(19) United States
(12) Patent Application Publication
(10) Pub. No.: US 2018/0118851 A1
(43) Pub. Date: May 3, 2018

(54) BISPECIFIC ANTIBODIES AGAINST PLASMA KALLIKREIN AND FACTOR XII

(71) Applicant: Dyax Corp., Burlington, MA (US)

(72) Inventors: Stephen R. Comeau, Chelmsford, MA (US); Andrew Nixon, Hanover, MA (US); Niksa Kastrapeli, Wellesley, MA (US); Jon A. Kenniston, Hingham, MA (US); Gregory P. Conley, Arlington, MA (US); Shauna Mason, Arlington, MA (US); Allison P. Lindberg, Arlington, MA (US); Kristopher Kopacz, Cumberland, RI (US); Burt Adelman, Concord, MA (US)

(73) Assignee: Dyax Corp., Burlington, MA (US)

(21) Appl. No.: 15/541,066

(22) PCT Filed: Dec. 31, 2015
(86) PCT No.: PCT/US15/68238

§ 371 Date: Jun. 30, 2017

Related U.S. Application Data
(60) Provisional application No. 62/099,236, filed on Jan. 2, 2015.
(60) Provisional application No. 62/200,363, filed on Aug. 3, 2015.
(60) Provisional application No. 62/261,609, filed on Dec. 1, 2015.

(51) Int. Cl. C07K 16/40; C07K 16/36; C12N 9/64; A61K 39/395

(52) U.S. Cl. CPC C07K 16/40; C07K 16/36; C12N 9/64; C07K 2317/51; C07K 2317/31; C07K 2317/622; C07K 2317/64; A61K 39/395

(57) ABSTRACT

Described herein are bispecific antibodies that bind to plasma kallikrein (pKal) and Factor XII and methods of producing and using such bi-specific antibodies for treating diseases or disorders associated with the contact system, e.g., hereditary angioedema or thrombosis. One aspect of the present disclosure is a bispecific antibody, comprising: a first polypeptide that comprises a light chain of a first antibody, the light chain comprising a light chain variable region (VL) and a light chain constant region (CL) (e.g., a kappa light chain or a lambda light chain); and a second polypeptide that comprises a heavy chain of the first antibody, the heavy chain comprising a heavy chain variable region (VH) and a heavy chain constant region (CH).

### CROSS REFERENCE TO RELATED APPLICATIONS

[0001] This application claims the benefit of the filing dates of U.S. Provisional Application No. 62/099,236, filed Jan. 2, 2015, U.S. Provisional Application No. 62/200,363, filed Aug. 3, 2015, and U.S. Provisional Application No. 62/261,609, filed Dec. 1, 2015. The entire contents of these referenced applications are incorporated by reference herein.

### BACKGROUND OF THE INVENTION

[0002] Factor XII (FXII) is the primary activator that converts pre-kallikrein into plasma kallikrein (pKal). Activated plasma kallikrein cleaves high molecular weight kininogen (HMWK) to release bradykinin (BK). pKal can also activate latent Factor XII into active Factor XII (Factor XIIa). In disease states related to aberrant activation of the contact system, such as Hereditary Angioedema, uncontrolled levels of BK can induce patient attacks.

### SUMMARY OF THE INVENTION

[0003] One aspect of the present disclosure is a bispecific antibody, comprising: a first polypeptide that comprises a light chain of a first antibody, the light chain comprising a light chain variable region (V_{L}) and a light chain constant region (C_{L}) (e.g., a kappa light chain or a lambda light chain); and a second polypeptide that comprises a heavy chain of the first antibody, the heavy chain comprising a heavy chain variable region (V_{H}) and a heavy chain constant region (C_{H}). Either the first polypeptide or the second polypeptide of the bispecific antibody further comprises a second antibody, which is a single chain antibody and can be fused to the C-terminus of either the first polypeptide or the second polypeptide. One of the first and second antibodies binds plasma kallikrein (pKal) (e.g., active pKal) and the other antibody binds Factor XII (e.g., active Factor XII or FXIIa), for example, the first antibody binds pKal and the second antibody binds FXIIa, or vice versa.

[0004] In some embodiments, the first antibody is an IgG. In one example, the IgG comprises a mutated heavy chain, which, as compared with the wild-type counterpart, has the C-terminal lysine residue deleted or mutated. For example, the mutated heavy chain of the first antibody may contain a C-terminal glycine residue, instead of a lysine residue as in a wild-type IgG heavy chain. In one example, the bispecific antibody can be tetravalent.

[0005] In some embodiments, the second polypeptide in the bispecific antibody comprises a peptide linker between the heavy chain of the first antibody and the second antibody. In one example, the peptide linker can be SGGGS (SEQ ID NO: 22).

[0006] In the second antibody, which is a scFv antibody, the V_{H} can be fused to the N-terminus of the V_{L}. Alternatively, the V_{H} is fused to the C-terminus of the V_{L}. In some examples, the second antibody comprises a peptide linker between the V_{H} and V_{L} regions, e.g., a linker of (G₄S)₄ (SEQ ID NO: 23). In some embodiments, the scFc antibody comprises a disulfide bond formed between the V_{H} and V_{L} chains. For example, the V_{H} chain may contain a cysteine residue at position 44 (C44) and the V_{L} chain may contain a cysteine residue at positon 100, wherein a disulfide bond can be formed between C₄₄ in the V_{H} and C₁₀₀ in the V_{L}. In some examples, the second antibody does not contain a KR motif at its C-terminus.

[0007] In any of the bispecific antibodies described herein, the V_{H} of the first antibody has the same complementarity determining regions (CDRs) as those in SEQ ID NO: 1. In some examples, the V_{H} of the first antibody comprises the amino acid sequence of SEQ ID NO: 1. In one example, the heavy chain of the first antibody comprises the amino acid sequence of residues 20-470 of SEQ ID NO: 9. In one example, the heavy chain of the first antibody comprises the amino acid sequence of SEQ ID NO; 9, 149, or 150. Alternatively or in addition, the V_{L} of the first antibody has the same CDRs as those in SEQ ID NO: 2. In some examples, the V_{L} of the first antibody comprises the amino acid sequence of SEQ ID NO: 2.

[0008] Further, the V_{H} of the second antibody can have the same CDRs as those in any of SEQ ID NOs: 3, 4 and 123-126. In some example, the V_{H} of the second antibody comprises any of the amino acid sequences of SEQ ID NO: 3, 4 and 123-126. Alternatively or in addition, the V_{L} of the second antibody has the same CDRs as those in any of SEQ ID NOs: 5-8 and 127-130. In some examples, the V_{L} of the second antibody comprises residues 1-111 of any one of the amino acid sequences of SEQ ID NOs: 5-8 and 127 In one example, the VL of the second antibody comprises any one of the amino acid sequences of SEQ ID Nos: 5-8 and 127-130.

[0009] In some examples, the bispecific antibody described herein comprises a first polypeptide that comprises the amino acid sequence of SEQ ID NO: 10 and the second polypeptide comprises any of the amino acid sequences of SEQ ID NOs: 11-20, 47-122, 141-148, and 151-158.

[0010] In another aspect, the present disclosure provides a bispecific antibody, which comprises a first antibody binding to plasma kallikrein (pKal) and a second antibody binding to Factor XII, for example, the first antibody binding to active pKal and/or the second antibody binding to active Factor XII (FXIIa). In some embodiments, the first antibody comprises a V_{H} chain that comprises the same complementarity determining regions (CDRs) as those in SEQ ID NO: 1, and/or a V_{L} chain that comprises the same CDRs as those in SEQ ID NO: 2. For example, the V_{H} of the first antibody comprises the amino acid sequence of SEQ ID NO: 1, and/or the V_{L} of the first antibody comprises the amino acid sequence of SEQ ID NO: 2.

[0011] Alternatively or in addition, the second antibody comprises a V_{H} chain that comprises the same CDRs as those in SEQ ID NO: 3 or 4, and/or a V_{L} chain that comprises the same CDRs as those in SEQ ID NO: 5, 6, 7, or 8. For example, the V_{H} chain of the second antibody comprises the amino acid sequence of SEQ ID NO: 3 or 4; and/or the V_{L} of the second antibody comprises the amino acid sequence of SEQ ID NO: 5, 6, 7, or 8.

[0012] Alternatively or in addition, the second antibody comprises a V_{H} chain that comprises the same CDRs as those in any of SEQ ID NOs: 123-126, and/or a V_{L} chain that comprises the same CDRs as those in SEQ ID NOs: 127. For example, the V_{H} chain of the second antibody comprises the amino acid sequence of any one of SEQ ID NO: 123-126; and/or the V_{L} of the second antibody comprises residues 1-111 of any one of the amino acid sequence of SEQ ID NO: 5-8 and 127.

[0013] In yet another aspect, the present disclosure provides an isolated nucleic acid or nucleic acid set, comprising a first nucleotide sequence encoding the first polypeptide or first antibody as described herein and a second nucleotide sequence encoding the second polypeptide or second antibody as described herein. In some embodiments, the first and second nucleotide sequences are located on two separate nucleic acid molecules (e.g., two vectors such as expression vectors). Alternatively, the first and second nucleic nucleotide sequences are located on one nucleic acid molecule (e.g., a vector such as an expression vector).

[0014] The nucleic acid or nucleic acid set described herein can be a vector set comprising a first vector that comprises the first nucleotide sequence and a second vector that comprises the second nucleotide sequence. In some examples, the first and second vectors are expression vectors, in which the first and second nucleotide sequences are in operably linkage to a promoter. In other examples, the nucleic acid described herein is a vector comprising both the first and second nucleotide sequences. Any of the vectors described herein can be an expression vector. For example, the expression vector can comprise the first and second nucleotide sequences are in operably linkage to a promoter. Also within the scope of this disclosure is a host cell comprising the vector or vector set described herein

[0015] Further, the present disclosure provides compositions comprising any of the bispecific antibodies or the nucleic acid/nucleic acid sets as described herein and a pharmaceutically acceptable carrier. Such a composition can be used to treat a disease associated with the contact activation system (e.g., hereditary angioedema (HAE) or thrombosis). The treatment method described herein comprises administering to a subject in need thereof an effective amount of the pharmaceutical composition described herein. The present disclosure also provides a pharmaceutical composition for use in treating the disease as described herein, wherein the pharmaceutical composition comprises any of the bispecific antibody described herein or a nucleic acid/nucleic acid set that encodes the bispecific antibody, and a pharmaceutical acceptable carrier, and the use of such a pharmaceutical composition in manufacturing a medicament for use in treating such a disease such as HAE or thrombosis. In some embodiments, thrombosis is associated with atrial fibrillation, deep vein thrombosis (DVT), pulmonary embolism, stroke, or an arterial or venous thrombotic event.

[0016] In still another aspect, the present disclosure features a method for preparing a bispecific antibody, the method comprising: (a) culturing the host cell or host cell set as described herein under conditions allowing for expression of the first polypeptide and the second polypeptide; and (b) isolating the bispecific antibody that comprises the first polypeptide and the second polypeptide. In some examples, the host cell comprises an expression vector comprising a first nucleotide sequence encoding the first polypeptide and a second nucleotide sequence encoding the second polypeptide.

[0017] The details of one or more embodiments of the disclosure are set forth in the description below. Other features or advantages of the present disclosure will be apparent from the following drawings and detailed description of several embodiments, and also from the appended claims.

### BRIEF DESCRIPTION OF THE DRAWINGS

[0018] The following drawings form part of the present specification and are included to further demonstrate certain aspects of the present disclosure, which can be better understood by reference to one or more of these drawings in combination with the detailed description of specific embodiments presented herein.

[0019] FIG. 1 is a graph showing the activity of various bispecific antibody clones for inhibiting pKal, including clones X120-A01 (scFv=559C-M184-B04 H→L), X121-E01 (scFv=559C-M184-G03 H→L), X122-A01 (scFv=559C-M71-F06 H→L), and X122-C01 (scFv=559C-M71-F06 L→H).

[0020] FIG. 2 includes graphs showing the FXIIa inhibition activity of clones X120-A01 (A and B), X122-A01 (C), X121-E01 (D), X122-C01 (E), and control clone M71-F06 IgG (F).

[0021] FIG. 3 includes graphs showing the analytical size exclusion chromatography (SEC) traces of 5 exemplary bispecific molecules. The front peak shows that these clones have a high molecular weight aggregate, ranging from %HMW 16.5-33.8. A: 620I-X136-C11. B: 620I-X136-C05. C: 620I-X136-G05. D: 620I-X136-D12. E: 620I-X136-A01.

[0022] FIG. 4 includes graphs showing reduction of high molecular weight aggregate for 620I-X0173-A11 (620I-X0136-D12 with H44/L100 engineered disulfide bond) across a range of concentrations. A: 620I-X0173-A11 at 1 mg/mL. B: 620I-X0173-A11 at 10 mg/mL. C: 620I-X0173-A11 at 20 mg/ml. D: 620I-X0173-A11 at 45 mg/ml.

[0023] FIG. 5 includes graphs showing the inhibitory activities of an anti-pKal antibody, an anti-FXIIa antibody, a combination of the anti-pKal antibody and the anti-FXIIa antibody, and the bispecific antibody D12, as determined by a reconstituted plasma assay. A: DX-2930 in the presence of one-chain HMWK. B: anti-FXIIa antibody in the presence of one-chain HMWK. C: DX-2930+anti-FXIIa in the presence of one-chain HMWK. D: bispecific clone 620I-X0136-D12 in the presence of one-chain HMWK.

[0024] FIG. 6 includes graphs showing the inhibitory activities of an anti-pKal antibody, an anti-FXIIa antibody, a combination of the anti-pKal antibody and the anti-FXIIa antibody, and the bispecific antibody D12, as determined by a reconstituted plasma assay. A: DX-2930 in the absence of HMWK. B: anti-FXIIa antibody in the absence of HMWK. C: DX-2930+ anti-FXIIa in the absence of HMWK. D: bispecific clone 620I-X0136-D12 in the absence of HMWK.

[0025] FIG. 7 includes graphs showing the inhibitory activities of an anti-pKal antibody, an anti-FXIIa antibody, a combination of the anti-pKal antibody and the anti-FXIIa antibody, and the bispecific antibody D12, as determined by a plasma assay. A: DX-2930 in the absence of HMWK. B: anti-FXIIa antibody in the absence of HMWK. C: DX-2930+anti-FXIIa in the absence of HMWK. D: bispecific clone D12 in the absence of HMWK.

[0026] FIG. 8 is a graph showing the effects of a bispecific antibody (D12) at three concentrations compared to an anti-FXIIa antibody (D06) and an anti-pKal antibody (H03) in an activated partial thromboplastin time (APTT) assay.

[0027] FIG. 9 includes graphs showing biacore binding of 620I-X0173-A11 (620I-X0136-D12 with disulfides) against pKal (Top sensorgram) and FXIIa (Bottom sensorgram). A: pKal binding (top curve) is higher than blank surface (middle) and pre-Kallikrein (bottom). Original FXIIa isolates showed non-specific binding to the biacore chip, which explains the binding signals seen for pre-Kal and blanks. B: FXIIa binding (top curve) is demonstrably higher than FXII (bottom) and blank (middle).

[0028] FIG. 10 includes graphs showing IC₅₀ and Ki, apparent calculations of 3 disulfide-constrained bispecific antibodies in Plasma Inhibition Assay. A and B: clone 620I-X0173-A11. C and D: clone 620I-X0173-C07. E and F: clone 620I-X0173-G11.

[0029] FIG. 11 is a graph showing the inhibitory features of bispecific antibody 620I-X0177-A01 (a.k.a. 620I-X0173-A11) as determined in Plasma Inhibition Assay.

[0030] FIG. 12 includes graphs showing that there are drop-offs in affinity between the parent IgGs and the bispecific antibodies. A: binding features of parent clone 559C-X0211-A01 (left panel) and bispecific antibody 620I-X0177-A01 (right panel). B: binding features of parent clone DX-2930 (left panel) and bispecific antibody A01 (right panel).

[0031] FIG. 13 is a chart showing dose-dependent delay of APTT by various antibodies as indicated. Clones D06, 1A01 and F12 are anti-FXIIa antibodies. Clone H03 is an anti-pKal antibody. Clones D12 and 7A01 are bispecific antibodies without and with disulfide bond, respectively.

[0032] FIG. 14 is a chart showing dose-dependent delay of fibrin deposition by clones 1A01 (559C-X211-A01) and 7A01 (620I-X0177-A01).

[0033] FIG. 15 is a SDS-PAGE protein gel showing samples of the bispecific antibody 620I-X0177-A01 under reduced conditions (lanes 2-4) and non-reduced conditions (lanes 6-8).

[0034] FIG. 16 includes graphs showing the analytical size exclusion chromatography (SEC) traces of the bispecific antibody 620I-X0177-A01 demonstrating pH dependent cleavage. The peaks between 15.7-16.1 minutes represent the correctly formed bispecific antibody. The peaks at 17 minutes represent DX-2930 IgG1. The peaks at 22 minutes represent the cleaved single chain antibody. A: pH 6.0. B: pH 7.0. C: 8.0.

[0035] FIG. 17 includes SDS-PAGE protein gels of the indicated bispecific antibodies, which are engineered to either mutate or delete the IgG C-terminal Lysine at t=0. A: non-reduced conditions. B: reduced conditions.

[0036] FIG. 18 shows a SDS-PAGE protein gel including the indicated bispecific antibodies engineered to either mutate or delete the IgG C-terminal lysine at t=48 hr under reduced conditions. The positive control is bispecific antibody 620I-X0177-A01.

[0037] FIG. 19 includes graphs showing the analytical size exclusion chromatography (SEC) traces of control bispecific antibody 620I-X0177-A01. The peaks between 15.7-16.1 minutes represent the correctly formed bispecific antibody. The peaks at 17 minutes represent DX-2930 IgG1. The peaks at 22 minutes represent the cleaved single chain antibody. A: t=0. B: t=48 hrs.

[0038] FIG. 20 includes graphs showing the analytical size exclusion chromatography (SEC) traces of re-engineered bispecific antibodies after 48 hours at room temperature at pH=7.5. A: 620I-X180-E07. B: 620I-X180-G03. C: 620I-X180-A05. D: 620I-X180-E06. E: 620I-X180-C11. F: 620I-X179-C01. G: 620I-X179-G05. H: 620I-X179-A09.

[0039] FIG. 21 shows a SDS-PAGE protein gel showing the indicated bispecific antibodies engineered to either mutate or delete the heavy chain IgG C-terminal lysine under non-reduced conditions. The positive control is 620I-X0177-A01. Samples were incubated with Endoproteinase Lys C at 37° C. for 1 hour.

[0040] FIG. 22 includes graphs showing pKal inhibition by example bispecific antibodies. Plate 1 shows inhibition features of bispecific antibodies 620I-X0179-A09 (open circles), 620I-X0179-C01 (closed triangles), and 620I-X0179-E05 (open triangles). Plate 2 shows inhibition features of bispecific antibodies 620I-X0179-G05 (open circles), 620I-X0180-E07 (closed triangles), and 620I-X0180-G03 (open triangles). Plate 3 shows inhibition features of bispecific antibodies 620I-X0180-A05 (open circles) and 620I-X0180-C11 (closed triangles). The antibody DX-2930 was used as a control on each of the plates.

[0041] FIG. 23 includes graphs showing FXIIa inhibition by example bispecific antibodies. Plate 1 shows inhibition features of bispecific antibodies 620I-X0179-A09 (open circles), 620I-X0179-C01 (closed triangles), and 620I-X0179-E05 (open triangles). Plate 2 shows inhibition features of bispecific antibodies 620I-X0179-G05 (open circles), 620I-X0180-E07 (closed triangles), and 620I-X0180-G03 (open triangles). Plate 3 shows inhibition features of bispecific antibodies 620I-X0180-A05 (open circles) and 620I-X0180-C11 (closed triangles). The antibody DX-4012 (559C-M0192-H11) was used as a control on each of the plates.

[0042] FIG. 24 includes graphs showing inhibition of activated plasma by example bispecific antibodies. The top left panel shows inhibition features of DX-2930 from control plates 1, 2, and 3, and DX-4012. The top right panel shows inhibition features of bispecific antibodies 620I-X0179-A09 (closed circles), 620I-X0179-C01 (open circles). The bottom left panel shows inhibition features of bispecific antibodies 620I-X0179-E05 (closed circles), 620I-X0179-G05 (open circles), and 620I-X0180-E07 (closed triangles). The bottom right panel shows inhibition features of bispecific antibodies 620I-X0180-G03 (closed circles), 620I-X0180-A05 (open circles), and 620I-X0180-C11 (closed triangles).

### DETAILED DESCRIPTION OF THE INVENTION

[0043] The contact activation system initiates the intrinsic pathway of coagulation through the release of the proinflammatory peptide bradykinin (BK). BK release is facilitated by a series of enzyme activation steps in the contact activation system. Factor XIIa (FXIIa) converts pre-kallikrein to plasma kallikrein (pKal). Activated pKal then cleaves high molecular weight kininogen (HMWK) to release bradykinin (BK). Importantly, pKal can also activate latent Factor XII to produce additional active Factor XIIa. It is believed that a positive feedback loop is formed, with pKal activating FXII to FXIIa, and FXIIa activating pre-kallikrein to pKal.

[0044] In diseases associated with the contact activation system, such as hereditary angioedema (HAE) or thrombosis, uncontrolled levels of BK can induce inflammatory responses, such as patient HAE attacks. Accordingly, agents for controlling the levels of BK, e.g., inhibitors of pKal and FXII, may have important therapeutic value.

[0045] Described herein are bispecific antibodies that bind to both pKal and FXII, e.g., active pKal and/or FXIIa, and uses thereof in inhibiting both pKal and FXII and treating diseases associated with the contact activation system, such as hereditary angioedema (HAE) and thrombosis. As shown in Examples below, a number of exemplary bispecific antibodies as described herein were shown to inhibit both pKal and FXIIa activities. Without wishing to be bound by theory, the bispecific antibodies described herein are expected to exhibit superior therapeutic effects in treating diseases associated with contact activation system, as compared to agents that can inhibit either pKal or FXII, because the bispecific antibodies can inhibit the activity of both pKal and FXII, thereby reducing the BK levels synergistically via, e.g., blocking the positive feedback loop between pKal and FXII.

Bispecific antibodies binding to pKal and FXII

[0046] As used herein, an antibody (interchangeably used in plural form) is an immunoglobulin molecule, or a functional fragment thereof, that is capable of binding to a target antigen, such as a carbohydrate, polynucleotide, lipid, or polypeptide, through at least one antigen recognition site located in the variable region of the immunoglobulin molecule. A multispecific antibody, e.g., a bispecific antibody, is an immunoglobulin molecule or a functional fragment/variant thereof, that is capable of binding to multiple target antigens, e.g., two antigens or two epitopes of one antigen. The bispecific antibodies described herein can bind to both plasma kallikrein (pKal) and Factor XII. In some embodiments, the bispecific antibodies can bind to and inhibit both active pKal and FXIIa.

[0047] Antigen, as used herein, refers to any molecule (e.g., protein, nucleic acid, polysaccharide, or lipid) that has the ability to generate antibodies. An epitope is a portion of an antigen (e.g., a portion of pKal or FXII) to which an antibody binds. Epitopes usually consist of chemically active (such as polar, non-polar or hydrophobic) surface groupings of moieties such as amino acids or polysaccharide side chains and can have specific three-dimensional structural characteristics, as well as specific charge characteristics. An epitope can be linear in nature or can be a discontinous epitope, e.g., a conformational epitope, which is formed by a spatial relationship between non-contiguous amino acids of an antigen rather than a linear series of amino acids. A conformational epitope includes epitopes resulting from folding of an antigen, where amino acids from differing portions of the linear sequence of the antigen come in close proximity in 3-dimensional space.

[0048] The bispecific antibody described herein comprises two antibody portions, a first antibody portion binding to pKal (e.g., active pKal) and a second antibody portion binding to FXII (e.g., FXIIa). The first and second antibodies portions can be derived from two parent antibodies capable of binding to the desired antigens, i.e., pKal (e.g., active pKal) and FXII (e.g., FXIIa). One or both of the parent antibodies for constructing the bispecific antibodies as described herein can be naturally occurring antibodies (e.g., an antibody derived from a suitable donor such as human, mouse, rat, rabbit, horse, or sheep), genetically engineered antibodies (e.g., humanized antibodies, chimeric antibodies), or antibodies derived from a natural or synthetic antibody library. In some embodiments, one parent antibody is an IgG antibody, e.g., an IgG antibody binding to pKal such as DX-2930 or an IgG antibody binding to FXIIa, and the other parent antibody is a scFv antibody, e.g., a scFv antibody binding to FXIIa such as the anti-FXIIa clones described herein or an scFv antibody binding to pKal.

[0049] The heavy chain of a naturally occurring IgG molecule typically contains a lysine residue at the C-terminus. In some embodiments, this C-terminal lysine residue can be either deleted or mutated, e.g., to a glycine residue, in the bispecific antibodies disclosed herein. Alternatively or in addition, the KR motif, which typically presents at the junction of a light chain variable region and a light chain constant region, can be deleted from the light chain of the first antibody, the second antibody, or both, in the bispecific antibodies described herein. In some examples, the KR motif is deleted from the scFv portion (e.g., at the C-terminus of the scFv) of any of the bispecific antibodies described herein. These mutations may reduce proteolytic cleavage and/or improve expression, production, and/or manufacture of the bispecific antibody.

[0050] In some examples, at least one parent antibody can be an affinity matured antibody, which refers to an antibody having one or more modifications in one or more CDRs or framework regions (FRs) as compared to the unmodified parent antibody, leading to an improvement in the affinity of the antibody for the target antigen. Preferred affinity matured antibodies may have nanomolar or even picomolar affinities for the target antigen. Affinity maturation of an antibody can be performed by various methods known in the art, including by variable domain shuffling (see, e.g., Marks et al. 1992, Bio/Technology 10:779-783), random mutagenesis of CDR and/or FR residues (see, e.g., Barbas et al., 1994, Proc Nat. Acad. Sci, USA 91:3809-3813; Schier et al., 1995, Gene 169: 147-155; Yelton et al., 1995, J. Immunol. 155:1994-2004; Jackson et al., 1995, J. Immunol. 154(7): 3310-9; and Hawkins et al, 1992, J. Mol. Biol. 226:889-896). The parent antibodies can be of any class, such as IgD, IgE, IgG, IgA, or IgM, or a sub-class thereof, or a single chain antibody, such as a scFv.

[0051] Each antibody portion in the bispecific antibody as described herein can be an antibody in any form, including, but not limited to, intact (i.e., full-length) antibodies, antigen-binding fragments thereof (such as Fab, Fab′, F(ab′)₂, Fv), single chain antibodies (scFv antibodies), and tetravalent antibodies. In some embodiments, the bispecific antibody is tetravalent, which comprises two binding sites for pKal and two binding sites for FXII.

[0052] In some embodiments, the anti-pKal portion, the anti-FXII portion, or both in the bispecific antibodies described herein specifically bind to the corresponding target antigen or an epitope thereof. An antibody that “specifically binds” to an antigen or an epitope is a term well understood in the art, and methods to determine such specific binding are also well known in the art. A molecule is said to exhibit “specific binding” if it reacts or associates more frequently, more rapidly, with greater duration and/or with greater affinity with a particular target antigen than it does with alternative targets. An antibody “specifically binds” to a target antigen or epitope if it binds with greater affinity, avidity, more readily, and/or with greater duration than it binds to other substances. For example, an antibody that specifically (or preferentially) binds to an antigen (e.g., human pKal or FXII) or an antigenic epitope therein is an antibody that binds this target antigen with greater affinity, avidity, more readily, and/or with greater duration than it binds to other antigens or other epitopes in the same antigen. It is also understood by reading this definition that, for example, an antibody that specifically binds to a first target antigen may or may not specifically or preferentially bind to a second target antigen. As such, “specific binding” or “preferential binding” does not necessarily require (although it can include) exclusive binding. Generally, but not necessarily, reference to binding means preferential binding. In some examples, an antibody that “specifically binds” to a target antigen or an epitope thereof may not bind to other antigens or other epitopes in the same antigen. In some embodiments, the bispecific antibody described herein specifically binds to both active pKal and FXIIa.

[0053] In some embodiments, a bispecific antibody as described herein has a suitable binding affinity for one or both of the target antigens (e.g., pKal or FXIIa) or antigenic epitopes thereof. As used herein, “binding affinity” refers to the apparent association constant or K_{A}. The K_{A} is the reciprocal of the dissociation constant (K_{D}). The bispecific antibody described herein may have a binding affinity (K_{D}) of at least 10⁻⁵, 10⁻⁶, 10⁻⁷, 10⁻⁸, 10⁻⁹, 10⁻¹⁰ M, or lower for one or both of the target antigens or antigenic epitopes. An increased binding affinity corresponds to a decreased K_{D}. Higher affinity binding of an antibody for a first antigen and a second antigen relative to a third antigen can be indicated by a higher K_{A} (or a smaller numerical value K_{D}) for binding the first antigen and second antigen than the K_{A} (or numerical value K_{D}) for binding the third antigen. In such cases, the antibody has specificity for the first antigen and second antigen (e.g., a first protein in a first conformation or mimic thereof and a second protein in a first conformation or mimic thereof) relative to the third antigen (e.g., the same first or second protein in a second conformation or mimic thereof; or a third protein). Differences in binding affinity (e.g., for specificity or other comparisons) can be at least 1.5, 2, 3, 4, 5, 10, 15, 20, 37.5, 50, 70, 80, 91, 100, 500, 1000, 10,000 or 10⁵ fold.

[0054] Binding affinity (or binding specificity) can be determined by a variety of methods including equilibrium dialysis, equilibrium binding, gel filtration, ELISA, surface plasmon resonance, or spectroscopy (e.g., using a fluorescence assay). Exemplary conditions for evaluating binding affinity are in HBS-P buffer (10 mM HEPES pH7.4, 150 mM NaCl, 0.005% (v/v) Surfactant P20). These techniques can be used to measure the concentration of bound binding protein as a function of target protein concentration. The concentration of bound binding protein ([Bound]) is related to the concentration of free target protein ([Free]) and the concentration of binding sites for the binding protein on the target where (N) is the number of binding sites per target molecule by the following equation:

[Bound]=[N][Free]/(Kd+[Free])

[0055] It is not always necessary to make an exact determination of K_{A}, though, since sometimes it is sufficient to obtain a quantitative measurement of affinity, e.g., determined using a method such as ELISA or FACS analysis, is proportional to K_{A}, and thus can be used for comparisons, such as determining whether a higher affinity is, e.g., 2-fold higher, to obtain a qualitative measurement of affinity, or to obtain an inference of affinity, e.g., by activity in a functional assay, e.g., an in vitro or in vivo assay.

(i) Anti-pKal portion

[0056] Any antibody capable of binding to pKal, such as active pKal, can be used in constructing the bispecific antibodies described herein. In some examples, the anti-pKal antibody portion in the bispecific antibody can bind to human pKal and inhibits its activity by at least 50% (e.g., 60%, 70%, 80%, 90%, 95% or greater). The inhibition constant (Ki) provides a measure of inhibitor potency; it is the concentration of inhibitor required to reduce enzyme activity by half and is not dependent on enzyme or substrate concentrations. The inhibitory activity of an anti-pKal antibody portion in the bispecific antibody described herein can be determined by routine methods. In some examples, the bispecific antibody as described herein has an anti-pKal K_{i,app} value lower than 1 nM, e.g., 0.5 nM, 0.2 nM, 0.1 nM, 0.09 nM, 0.08 nM, 0.07 nM, 0.06 nM, 0.05 nM, 0.04 nM, 0.03 nM, 0.02 nM, 0.01 nM, or lower. The K_{i,app} value of an antibody can be estimated following the methods known in the art.

[0057] In some embodiments, the anti-pKal portion of the bispecific antibody can interact with one or more of the following residues: V410, L412, T413, A414, Q415, R416, L418, C419, H434, C435, F436, D437, G438, L439, W445, Y475, K476, V477, S478, E479, G480, D483, F524, E527, K528, Y552, D554, Y555, A564, D572, A573, C574, K575, G576, S578, T596, S597, W598, G599, E600, G601, C602, A603, R604, Q607, P608, G609, V610, and Y611 in human pKal. The amino acid sequence of the C-terminal fragment of human pKal that encompasses the involved amino acid residues (boldfaced and underlined) is shown below (SEQ ID NO: 21):

391-IVGGTNSSWG EWPWQVSLQV KLTAQRHLCG GSLIGHQWVL
TAAHCFDGLP LQDVWRIYSG ILNLSDITKD TPFSQIKEII
IHQNYKVSEG NHDIALIKLQ APLNYTEFQK PISLPSKGDT
STIYTNCWVT GWGFSKEKGE IQNILQKVNI PLVTNEECQK
RYQDYKITQR MVCAGYKEGG KDACKGDSGG PLVCKHNGMW
RLVGITSWGE GCARREQPGV YTKVAEYMDW ILEKTQSSDG
KAQMQSPA-638

[0058] In some examples, the anti-PKal antibody portion can bind an epitope of the pKal, the epitope comprising one of the following segments in SEQ ID NO: 21 shown above: V410-C419, H434-L439, Y475-G480, F524-K528, Y552-Y555, D572-5578, T596-R604, or Q607-Y611.

[0059] In one example, the anti-pKal portion of the bispecific antibody described herein is derived from antibody DX-2930, which is described in US 20120201756 (incorporated by reference herein). The heavy chain variable region and light chain variable region of DX-2930, as well as the full-length heavy chain and light chain of this antibody, are provided below (CDR regions: boldfaced and underlined; signal sequences: italic):

Heavy chain variable region of DX-2930 (SEQ ID NO:
1):
EVQLLESGGGLVQPGGSLRLSCAASGFTFSHYIMMWVRQAPGKGLEWVSG
IYSSGGITVYADSVKGRFTISRDNSKNTLYLQMNSLRAEDTAVYYCAYRR
IGVPRRDEFDIWGQGTMVTVSS
Light chain variable region of DX-2930 (SEQ ID NO:
2):
DIQMTQSPSTLSASVGDRVTITCRASQSISSWLAWYQQKPGKAPKLLIYK
ASTLESGVPSRFSGSGSGTEFTLTISSLQPDDFATYYCQQYNTYWTFGQG
TKVEIK
DX-2930 heavy chain (SEQ ID NO: 9)
MGWSCIILFLVATATGAHSEVQLLESGGGLVQPGGSLRLSCAASGFTFSH
YIMMWVRQAPGKGLEWVSGIYSSGGITVYADSVKGRFTISRDNSKNTLYL
QMNSLRAEDTAVYYCAYRRIGVPRRDEFDIWGQGTMVTVSSASTKGPSVF
PLAPSSKSTSGGTAALGCLVKDYFPEPVTVSWNSGALTSGVHTFPAVLQS
SGLYSLSSVVTVPSSSLGTQTYICNVNHKPSNTKVDKRVEPKSCDKTHTC
PPCPAPELLGGPSVFLFPPKPKDTLMISRTPEVTCVVVDVSHEDPEVKFN
WYVDGVEVHNAKTKPREEQYNSTYRVVSVLTVLHQDWLNGKEYKCKVSNK
ALPAPIEKTISKAKGQPREPQVYTLPPSREEMTKNQVSLTCLVKGFYPSD
IAVEWESNGQPENNYKTTPPVLDSDGSFFLYSKLTVDKSRWQQGNVFSCS
VMHEALHNHYTQKSLSLSPGK
DX-2930 light chain (SEQ ID NO: 10)
MGWSCIILFLVATATGVHSDIQMTQSPSTLSASVGDRVTITCRASQSISS
WLAWYQQKPGKAPKLLIYKASTLESGVPSRFSGSGSGTEFTLTISSLQPD
DFATYYCQQYNTYWTFGQGTKVEIKRTVAAPSVFIFPPSDEQLKSGTASV
VCLLNNFYPREAKVQWKVDNALQSGNSQESVTEQDSKDSTYSLSSTLTLS
KADYEKHKVYACEVTHQGLSSPVTKSFNRGEC

[0060] In some examples, the anti-pKal portion of the bispecific antibody comprises a heavy chain variable region that comprises an amino acid sequence at least 80% (e.g., 85%, 90%, 95%, or 98%) identical to SEQ ID NO: 1 and/or a light chain variable region that comprises an amino acid sequence at least 80% (e.g., 85%, 90%, 95%, or 98%) identical to SEQ ID NO: 2. The “percent identity” of two amino acid sequences is determined using the algorithm of Karlin and Altschul Proc. Natl. Acad. Sci. USA 87:2264-68, 1990, modified as in Karlin and Altschul Proc. Natl. Acad. Sci. USA 90:5873-77, 1993. Such an algorithm is incorporated into the NBLAST and XBLAST programs (version 2.0) of Altschul, et al. J. Mol. Biol. 215:403-10, 1990. BLAST protein searches can be performed with the XBLAST program, score=50, wordlength=3 to obtain amino acid sequences homologous to the protein molecules of interest. Where gaps exist between two sequences, Gapped BLAST can be utilized as described in Altschul et al., Nucleic Acids Res. 25(17):3389-3402, 1997. When utilizing BLAST and Gapped BLAST programs, the default parameters of the respective programs (e.g., XBLAST and NBLAST) can be used.

[0061] In other examples, the anti-pKal portion in the bispecific antibody as described herein comprises a heavy chain variable region that comprises the same three CDRs as those in SEQ ID NO: 1, and/or the same three CDRs as those in SEQ ID NO: 2. Two heavy chain variable regions (or two light chain variable regions) having the same CDRs means that the CDRs in the two heavy chain variable regions (or light chain variable regions) as determined by the same numbering scheme are identical. Exemplary numbering schemes for determining antibody CDRs include the “Kabat” numbering scheme (Kabat et al. (1991), 5th Ed. Public Health Service, National Institutes of Health, Bethesda, Md.), the “Chothia” numbering scheme (Al-Lazikani et al., (1997) JMB 273,927-948), the “Contact” numbering scheme (MacCallum et al., J. Mol. Biol. 262: 732-745 (1996)), the “IMGT” numbering scheme (Lefranc M P et al., Dev Comp Immunol, 2003 January; 27(1): 55-77), and the “AHo” numbering scheme (Honegger A and Pluckthun A, J Mol Biol, 2001 Jun. 8; 309(3): 657-70). As known to those skilled in the art, the CDR regions of the exemplary anti-pKal and anti-FXII antibodies identified herein are determined by the “Chothia” numbering scheme, which is used as an example.

[0062] Alternatively, the anti-pKal portion can include one or more (e.g., up to 2, 3, 4, 5, 6, 7, or 8) mutations in one or more of the CDRs as compared to SEQ ID NO: 1 and/or SEQ ID NO: 2. Such mutations can be conservative amino acid substitutions. As used herein, a “conservative amino acid substitution” refers to an amino acid substitution that does not alter the relative charge or size characteristics of the protein in which the amino acid substitution is made. Conservative substitutions of amino acids include substitutions made amongst amino acids within the following groups: (a) M, I, L, V; (b) F, Y, W; (c) K, R, H; (d) A, G; (e) S, T; (f) Q, N; and (g) E, D.

[0063] In any of the examples described herein, the anti-pKal portion of the bispecific antibody may comprise one or more (e.g., 1, 2, 3, 4, 5, or more) mutations or deletions as compared with a reference antibody. Such mutations may be introduced, for example to reduce proteolytic cleavage of the bispecific antibody, and/or to improve expression, production, and/or manufacture of the bispecific antibody. In some embodiments, the anti-pKal portion of the bispecific antibody is an IgG and the heavy chain of the IgG has the C-terminal lysine residue removed or mutated as compared with its wild-type counterpart. In some embodiments, the IgG heavy chain C-terminal lysine is mutated to a neutral amino acid residue, for example, a glycine residue or an alanine residue.

[0064] Example sequences of such mutated heavy chains of the anti-pKal portion of a bispecific antibody are provided below (using the heavy chain of DX-2930 as an example).

DX-2930 heavy chain including deletion of
C-terminal lysine residue

(SEQ ID NO: 149)

MGWSCIILFLVATATGAHSEVQLLESGGGLVQPGGSLRLSCAASGFTFSH
YIMMWVRQAPGKGLEWVSGIYSSGGITVYADSVKGRFTISRDNSKNTLYL
QMNSLRAEDTAVYYCAYRRIGVPRRDEFDIWGQGTMVTVSSASTKGPSVF
PLAPSSKSTSGGTAALGCLVKDYFPEPVTVSWNSGALTSGVHTFPAVLQS
SGLYSLSSVVTVPSSSLGTQTYICNVNHKPSNTKVDKRVEPKSCDKTHTC
PPCPAPELLGGPSVFLFPPKPKDTLMISRTPEVTCVVVDVSHEDPEVKFN
WYVDGVEVHNAKTKPREEQYNSTYRVVSVLTVLHQDWLNGKEYKCKVSNK
ALPAPIEKTISKAKGQPREPQVYTLPPSREEMTKNQVSLTCLVKGFYPSD
IAVEWESNGQPENNYKTTPPVLDSDGSFFLYSKLTVDKSRWQQGNVFSCS
VMHEALHNHYTQKSLSLSPG
DX-2930 heavy chain including mutation of
C-terminal lysine to glycine

(SEQ ID NO: 150)

MGWSCIILFLVATATGAHSEVQLLESGGGLVQPGGSLRLSCAASGFTFSH
YIMMWVRQAPGKGLEWVSGIYSSGGITVYADSVKGRFTISRDNSKNTLYL
QMNSLRAEDTAVYYCAYRRIGVPRRDEFDIWGQGTMVTVSSASTKGPSVF
PLAPSSKSTSGGTAALGCLVKDYFPEPVTVSWNSGALTSGVHTFPAVLQS
SGLYSLSSVVTVPSSSLGTQTYICNVNHKPSNTKVDKRVEPKSCDKTHTC
PPCPAPELLGGPSVFLFPPKPKDTLMISRTPEVTCVVVDVSHEDPEVKFN
WYVDGVEVHNAKTKPREEQYNSTYRVVSVLTVLHQDWLNGKEYKCKVSNK
ALPAPIEKTISKAKGQPREPQVYTLPPSREEMTKNQVSLTCLVKGFYPSD
IAVEWESNGQPENNYKTTPPVLDSDGSFFLYSKLTVDKSRWQQGNVFSCS
VMHEALHNHYTQKSLSLSPGG

[0065] The italicized portions of the sequences provided above refer to the signal peptides. The anti-pKal portion of the bispecific antibody disclosed herein may include the same signal peptides, may have the signal peptides removed or replaced with a different signal peptide. Signal peptides for use in producing secretory proteins are well known in the art.

[0066] The anti-pKal portion in the bispecific antibody can be in any antibody form, including, but not limited to, intact (i.e., full-length) antibodies, antigen-binding fragments thereof (such as Fab, Fab′, F(ab′)₂, Fv), and single chain antibodies. In some examples, the heavy chain variable region of the anti-pKal portion as described herein is linked to a heavy chain constant region (C_{H}), which can be the full-length of a heavy chain constant region or a portion thereof (e.g., C_{H}1, C_{H}2, C_{H}3, or a combination thereof). The heavy chain constant region can be derived from any C_{H} known in the art. In some embodiments, the C_{H} is a gamma heavy chain. Alternatively or in addition, the light chain variable region of the anti-pKal portion is linked to a light chain constant region (C_{L}), which can be any C_{L} known in the art. In some examples, the C_{L} is a kappa light chain. In other examples, the C_{L} is a lambda light chain. Antibody heavy and light chain constant regions are well known in the art, e.g., those provided in the IMGT database (www.imgt.org) or at www.vbase2.org/vbstat.php., both of which are incorporated by reference herein. In some examples, the anti-pKal portion is an IgG, which can comprise the same heavy chain as DX-2930 (SEQ ID NO: 9) and/or the same light chain as DX-2930 (SEQ ID NO: 10).

[0067] Alternatively, the anti-pKal portion in the bispecific antibody as described herein can be a single-chain antibody (ScFv), in which a heavy chain variable region and light chain variable region are fused, e.g., via a peptide linker such as the linker of (GGGGS)₄ (SEQ ID NO: 23). In one example, the heavy chain variable region and light chain variable region are fused in an H→L orientation. In another example, the heavy chain variable region and light chain variable region are fused in an L→H orientation. In some embodiments, the light chain portion of the ScFv does not contain a Lys-Arg (KR) motif at its C-terminus.

[0068] In one example, the anti-pKal portion in the bispecific antibody described herein is DX-2930 (an IgG antibody) described herein, which comprises a heavy chain of SEQ ID NO: 9 and a light chain of SEQ ID NO: 10, or an antigen-binding fragment thereof.

(ii) Anti-FXII portion

[0069] Any antibody capable of binding to FXII, such as active FXII (FXIIa), can be used in constructing the bispecific antibodies described herein. In some examples, the anti-FXII antibody portion in the bispecific antibody can bind to human FXIIa and inhibits its activity by at least 50% (e.g., 60%, 70%, 80%, 90%, 95% or greater). The inhibitory activity of the anti-FXII antibody portion in the bispecific antibody described herein can be determined by routine methods. In some examples, the bispecific antibody as described herein has an anti-FXIIa K_{i,app} value lower than 1 nM, e.g., 0.5 nM, 0.2 nM, 0.1 nM, 0.09 nM, 0.08 nM, 0.07 nM, 0.06 nM, 0.05 nM, 0.04 nM, 0.03 nM, 0.02 nM, 0.01 nM, or lower. The K_{i,app} value of an antibody can be estimated following the methods known in the art.

[0070] In some example, the anti-FXII portion of the bispecific antibody described herein is derived from anti-FXII clones 559C-M0071-F06, 559C-M0179-D04, 559C-M0181-C02, 559C-M0180-G03, and 559C-M0184-B04. The heavy chain variable regions and light chain variable regions of these clones are provided below (CDRs in boldface and underlined):

Heavy chain variable region of clones
559C-M0071-F06, 559C-M0179-D04, 559C-M0181-C02,
and 559C-M0180-G03 (SEQ ID NO: 3):
EVQLLESGGGLVQPGGSLRLSCAASGFTFSGYIMAWVRQAPGKGLEWVSY
IYPSGGITVYADSVKGRFTISRDNSKNTLYLQMNSLRAEDTAVYYCTRQR
YRGPKYYYYMDVWGKGTTVTVSS
Heavy chain variable region of clone 559C-M0184-B04 (SEQ ID NO: 4):
EVQLLESGGGLVQPGGSLRLSCAASGFTFSFYSMHWVRQAPGKGLEWVSR
IYPSGGVTKYADSVKGRFTISRDNSKNTLYLQMNSLRAEDTAVYYCTRQR
YRGPKYYYYMDVWGKGTTVTVSS
Light chain variable region of clones
559C-M0071-F06 and 559C-M0184-B04 (SEQ ID NO: 5):
DIQMTQSPLSLPVTPGEPASISCRSSQSLLHSNGYNYLDWYLQKPGQSPQ
LLIYLGSNRASGVPDRFSGSGSGTDFTLKISRVEAEDVGVYYCMQALQTP
WTFGQGTKVEIKR
Light chain variable region of clone
559C-M0179-D04 (SEQ ID NO: 6):
DIQMTQSPLSLSVAPGEPASISCRSSQSLLHRNGHNYLDWYLQKPGQSPQ
LLIYLGSNRASGVPERFSGSGSGTDFTLRISRVEAEDVGVYYCMQALQAR
TFGQGTKVEIKR
Light chain variable region of clone
559C-M0181-C02 (SEQ ID NO: 7):
DIQMTQSPLSLPVTPGEPASISCRSSQSLLHSNGYNYLDWYLQKPGQSPQ
LLIYLGSNRASGVPDRFSGSGSGTDFTLKISRVEAEDVGVYYCMQALQTR
TFGQGTKVEIKR
Light chain variable region of clone
559C-M0180-G03 (SEQ ID NO: 8):
DIQMTQSPLSLPVTPGEPASISCRSSQSLLHSNGYNYLDWYLQKPGQSPQ
IMIYLGSNRASGVPDRFSGSGSGTDFTLKISRVEAEDVGVYYCMQALQTP
RTFGQGTKVEIKR
Heavy chain variable region of clone
620I-X0173-A11 (620I-X0177-A01) (SEQ ID NO: 123)
EVQLLESGGGLVQPGGSLRLSCAASGFTFSQYVMHWVRQAPGKCLEWVSS
IWPSGGHTRYADSVKGRFTISRDNSKNTLYLQMNSLRAEDTAVYYCARQR
YRGPKYYYYMDVWGQGTTVTVSS
Heavy chain variable region of clone
620I-X0173-C07 (620I-X0177-C01) (SEQ ID NO: 124)
EVQLLESGGGLVQPGGSLRLSCAASGFTFSWYVMHWVRQAPGKCLEWVSS
IYPSGGKTSYADSVKGRFTISRDNSKNTLYLQMNSLRAEDTAVYYCARQR
YRGPKYYYYMDVWGQGTTVTVSS
Heavy chain variable region of clone
620I-X0173-E07 (620I-X0177-E01) (SEQ ID NO: 125)
EVQLLESGGGLVQPGGSLRLSCAASGFTFSWYSMHWVRQAPGKCLEWVSV
IYPSGGKTRYADSVKGRFTISRDNSKNTLYLQMNSLRAEDTAVYYCARQR
YRGPKYYYYMDVWGQGTTVTVSS
Heavy chain variable region of clone
620I-X0173-G11 (620I-X0177-G01) (SEQ ID NO: 126)
EVQLLESGGGLVQPGGSLRLSCAASGFTFSHYVMHWVRQAPGKCLEWVSS
IYPSGGLTKYADSVKGRFTISRDNSKNTLYLQMNSLRAEDTAVYYCARQR
YRGPKYYYYMDVWGQGTTVTVSS
Light chain variable region of clone
620I-X0173-A11 (SEQ ID NO: 127)
DIVMTQSPLSLPVTPGEPASISCRSSQSLLHSNGYNYLDWYLQKPGQSPQ
LLIYLGSNRASGVPDRFSGSGSGTDFTLKISRVEAEDVGVYYCMQALQTP
WTFGCGTKVEIKR
Light chain variable region of clone
620I-X0173-C07 (SEQ ID NO: 128)
DIVMTQSPLSLPVTPGEPASISCRSSQSLLHSNGYNYLDWYLQKPGQSPQ
LLIYLGSNRASGVPDRFSGSGSGTDFTLKISRVEAEDVGVYYCMQALQTP
WTFGCGTKVEIKR
Light chain variable region of clone
620I-X0173-E07 (SEQ ID NO: 129)
DIVMTQSPLSLPVTPGEPASISCRSSQSLLHSNGYNYLDWYLQKPGQSPQ
LLIYLGSNRASGVPDRFSGSGSGTDFTLKISRVEAEDVGVYYCMQALQTP
WTFGCGTKVEIKR
Light chain variable region of clone
620I-X0173-G11 (SEQ ID NO: 130)
DIVMTQSPLSLPVTPGEPASISCRSSQSLLHSNGYNYLDWYLQKPGQSPQ
LLIYLGSNRASGVPDRFSGSGSGTDFTLKISRVEAEDVGVYYCMQALQTP
WTFGCGTKVEIKR

[0071] The light chain variable regions of clones 620I-X0173-A11 (SEQ ID No:127), 620I-X0173-C07 (SEQ ID NO: 128), 620I-X0173-E07 (SEQ ID NO: 129), and 620I-X0173-G11 (SEQ ID NO: 130) are identical.

[0072] In some examples, the anti-FXIIa portion of the bispecific antibody comprises a heavy chain variable region that comprises an amino acid sequence at least 80% (e.g., 85%, 90%, 95%, or 98%) identical to SEQ ID NO: 3 or SEQ ID NO: 4, and/or a light chain variable region that comprises an amino acid sequence at least 80% (e.g., 85%, 90%, 95%, or 98%) identical to any of SEQ ID NOs: 5-8. For example, the heavy chain variable region can comprise an amino acid sequence at least 80% (e.g., 85%, 90%, 95%, or 98%) identical to SEQ ID NO: 3 and the light chain variable region can comprise an amino acid sequence at least 80% (e.g., 85%, 90%, 95%, or 98%) identical to any of SEQ ID NOs: 5-8. Alternatively, the heavy chain variable region can comprise an amino acid sequence at least 80% (e.g., 85%, 90%, 95%, or 98%) identical to SEQ ID NO: 4 and the light chain variable region can comprise an amino acid sequence at least 80% (e.g., 85%, 90%, 95%, or 98%) identical to SEQ ID NO: 5.

[0073] In some examples, the anti-FXIIa portion of the bispecific antibody comprises a heavy chain variable region that comprises an amino acid sequence at least 80% (e.g., 85%, 90%, 95%, or 98%) identical to any of SEQ ID NOs: 123-126, and/or a light chain variable region that comprises an amino acid sequence at least 80% (e.g., 85%, 90%, 95%, or 98%) identical to any of SEQ ID NOs: 127-130. For example, the heavy chain variable region can comprise an amino acid sequence at least 80% (e.g., 85%, 90%, 95%, or 98%) identical to SEQ ID NO: 123 and the light chain variable region can comprise an amino acid sequence at least 80% (e.g., 85%, 90%, 95%, or 98%) identical to SEQ ID NO: 127. Alternatively, the heavy chain variable region can comprise an amino acid sequence at least 80% (e.g., 85%, 90%, 95%, or 98%) identical to SEQ ID NO: 124 and the light chain variable region can comprise an amino acid sequence at least 80% (e.g., 85%, 90%, 95%, or 98%) identical to SEQ ID NO: 128. Alternatively, the heavy chain variable region can comprise an amino acid sequence at least 80% (e.g., 85%, 90%, 95%, or 98%) identical to SEQ ID NO: 125 and the light chain variable region can comprise an amino acid sequence at least 80% (e.g., 85%, 90%, 95%, or 98%) identical to SEQ ID NO: 129. Alternatively, the heavy chain variable region can comprise an amino acid sequence at least 80% (e.g., 85%, 90%, 95%, or 98%) identical to SEQ ID NO: 126 and the light chain variable region can comprise an amino acid sequence at least 80% (e.g., 85%, 90%, 95%, or 98%) identical to SEQ ID NO: 130.

[0074] In other examples, the anti-FXIIa portion in the bispecific antibody as described herein comprises a heavy chain variable region and/or a light chain variable region that comprises the same three CDRs as those in clones 559C-M0071-F06, 559C-M0179-D04, 559C-M0181-C02, 559C-M0180-G03, 559C-M0184-B04, 620I-X0173-A11, 620I-X0173-C07, 620I-X0173-E07, or 620I-X0173-G11, and/or the same three CDRs as those in these clones. See Table 1 below:

TABLE 1
CDR Sequences of Anti-FXIIa Clones:

| Clones | LCDR1 | LCDR2 | LCDR3 | HCDR1 | HCDR2 | HCDR3 |
|---|---|---|---|---|---|---|
| 559C- | RSSQSLLHSN | LGSNRAS | MQALQTP | GYIMA | YIYPSGGITV | QRYRGPKYY |
| M0071- | GY | (SEQ ID | WT | (SEQ ID | YA | YYMDV (SEQ ID |
| F06 | NYLD (SEQ ID | NO: 36) | (SEQ ID | NO: 41) | DSVKG (SEQ | NO: 45) |
| | NO: 34) | | NO: 37) | | ID NO: 43) | |
| 559C- | RSSQSLLHRN | LGSNRAS | MQALQART | GYIMA | YIYPSGGITV | QRYRGPKYY |
| M0179- | GH | (SEQ ID | (SEQ ID | (SEQ ID | YA | YYMDV (SEQ ID |
| D04 | NYLD (SEQ ID | NO: 36) | NO: 38) | NO: 41) | DSVKG (SEQ | NO: 45) |
| | NO: 35) | | | | ID NO: 43) | |
| 559C- | RSSQSLLHSN | LGSNRAS | MQALQTRT | GYIMA | YIYPSGGITV | QRYRGPKYY |
| M0181- | GY | (SEQ ID | (SEQ ID | (SEQ ID | YA | YYMDV (SEQ ID |
| C02 | NYLD (SEQ ID | NO: 36) | NO: 39) | NO: 41) | DSVKG (SEQ | NO: 45) |
| | NO: 34) | | | | ID NO: 43) | |
| 559C- | RSSQSLLHSN | LGSNRAS | MQALQTPRT | GYIMA | YIYPSGGITV | QRYRGPKYY |
| M0180- | GY | (SEQ ID | (SEQ ID | (SEQ ID | YA | YYMDV (SEQ ID |
| G03 | NYLD (SEQ ID | NO: 36) | NO: 40) | NO: 41) | DSVKG (SEQ | NO: 45) |
| | NO: 34) | | | | ID NO: 43) | |
| 559C- | RSSQSLLHSN | LGSNRAS | MQALQTP | FYSMH | RIYPSGGVTK | QRYRGPKYY |
| M0184- | GY | (SEQ ID | WT | (SEQ ID | YA | YYMDV (SEQ ID |
| B04 | NYLD (SEQ ID | NO: 36) | (SEQ ID | NO: 42) | DSVKG (SEQ | NO: 45) |
| | NO: 34) | | NO: 37) | | ID NO: 44) | |
| 620I- | RSSQSLLHSN | LGSNRAS | MQALQTP | QYVMH | SIWPSGGHTR | QRYRGPKYYYY |
| X0173- | GYNYLD | (SEQ ID | WT (SEQ ID | (SEQ ID | YADSVKG | MDV (SEQ ID |
| A11 | (SEQ ID NO: | NO: 36) | NO: 37) | NO: 132) | (SEQ ID NO: | NO: 134) |
| | 131) | | | | 133) | |
| 620I- | RSSQSLLHSN | LGSNRAS | MQALQTP | WYVMH | SIYPSGGKTS | QRYRGPKYYYY |
| X0173- | GYNYLD | (SEQ ID | WT (SEQ ID | (SEQ ID | YADSVKG | MDV (SEQ ID |
| C07 | (SEQ ID NO: | NO: 36) | NO: 37) | NO: 135) | (SEQ ID NO: | NO: 134) |
| | 131) | | | | 136) | |
| 620I- | RSSQSLLHSN | LGSNRAS | MQALQTP | WYSMH | VIYPSGGKTR | QRYRGPKYYYY |
| X0173- | GYNYLD | (SEQ ID | WT (SEQ ID | (SEQ ID | YADSVKG | MDV (SEQ ID |
| E07 | (SEQ ID NO: | NO: 36) | NO: 37) | NO: 137) | (SEQ ID NO: | NO: 134) |
| | 131) | | | | 138) | |
| 620I- | RSSQSLLHSN | LGSNRAS | MQALQTP | HYVMH | SIYPSGGLTK | QRYRGPKYYYY |
| X0173- | GYNYLD | (SEQ ID | WT (SEQ ID | (SEQ ID | YADSVKG | MDV (SEQ ID |
| G11 | (SEQ ID NO: | NO: 36) | NO: 37) | NO: 139) | (SEQ ID NO: | NO: 134) |
| | 131) | | | | 140) | |

[0075] Alternatively, the anti-FXIIa portion can include one or more (e.g., up to 2, 3, 4, 5, 6, 7, or 8) mutations in one or more of the heavy chain and/or light chain CDRs listed in Table 1 above, as compared to any of the clones 559C-M0071-F06, 559C-M0179-D04, 559C-M0181-C02, 559C-M0180-G03, 559C-M0184-B04, 620I-X0173-A11, 620I-X0173-C07, 620I-X0173-E07, or 620I-X0173-G11. Such mutations can be conservative amino acid substitutions as described herein.

[0076] In some embodiments, the anti-FXIIa portion in the bispecific antibody described herein is an IgG molecule, which can be a naturally-occurring IgG or a mutant, e.g., comprising one or more (e.g., 1, 2, 3, 4, 5, or more) mutations or deletions, for example to reduce proteolytic cleavage of the bispecific antibody, to reduce charge heterogeneity of the bispecific antibody, and/or to improve expression, production, and/or manufacture of the bispecific antibody. In some embodiments, the heavy chain of the IgG has the C-terminal lysine residue removed or mutated as compared with its wild-type counterpart. In some embodiments, the IgG heavy chain C-terminal lysine is mutated to a neutral amino acid residue, for example, a glycine residue or an alanine residue.

[0077] The anti-FXIIa portion in the bispecific antibody can be in any antibody form, including, but not limited to intact (i.e., full-length) antibodies, antigen-binding fragments thereof (such as Fab, Fab′, F(ab′)₂, Fv), and single chain antibodies. In some examples, the heavy chain variable region of the anti-pKal portion as described herein is linked to a heavy chain constant region (C_{H}), which may be the full-length of a heavy chain constant region or a portion thereof (e.g., C_{H}1, C_{H}2, C_{H}3, or a combination thereof). The heavy chain constant region can be derived from any C_{H} known in the art. In some embodiments, the C_{H} is a gamma heavy chain. Alternatively or in addition, the light chain variable region of the anti-pKal portion is linked to a light chain constant region (C_{L}), which can be any C_{L} known in the art. In some examples, the C_{L} is a kappa light chain. In other examples, the C_{L} is a lambda light chain. Antibody heavy and light chain constant regions are well known in the art, e.g., described herein.

[0078] Alternatively, the anti-FXIIa portion in the bispecific antibody as described herein can be a single-chain antibody, in which a heavy chain variable region and light chain variable region are fused, e.g., via a flexible peptide linker such as the linker of (GGGGS)₄ (SEQ ID NO: 23). The heavy chain variable region and light chain variable region can be fused in an H→L orientation, or fused in an L→H orientation. In some embodiments, the light chain portion of the ScFv does not contain a KR motif at its C-terminus.

[0079] In some embodiments, the anti-FXIIa portion is a scFv comprising a heavy chain variable region of SEQ ID NO: 3 or SEQ ID NO: 4, and/or a light chain variable region of any of SEQ ID NOs: 5-8. In one example, the anti-FXIIa portion is a scFv antibody comprising a heavy chain variable region of SEQ ID NO: 3 and a light chain variable region of any of SEQ ID NOs: 5-8 in either H→L or L→H orientation. In another example, the anti-FXIIa portion is a scFv antibody comprising a heavy chain variable region of SEQ ID NO: 4 and a light chain variable region of SEQ ID NO: 5 in either H→L or L→H orientation. In some embodiments, the anti-FXIIa portion is a scFv comprising a heavy chain variable region of any of SEQ ID NOs: 123-126, and/or a light chain variable region of any of SEQ ID NOs: 127-130. In one example, the anti-FXIIa portion is a scFv antibody comprising a heavy chain variable region of SEQ ID NO: 123 and a light chain variable region of SEQ ID NO: 127 in either H→L or L→H orientation. In one example, the anti-FXIIa portion is a scFv antibody comprising a heavy chain variable region of SEQ ID NO: 123 and a light chain variable region of SEQ ID NO: 127 in either H→L or L→H orientation. In another example, the anti-FXIIa portion is a scFv antibody comprising a heavy chain variable region of SEQ ID NO: 124 and a light chain variable region of SEQ ID NO: 128 in either H→L or L→H orientation. In another example, the anti-FXIIa portion is a scFv antibody comprising a heavy chain variable region of SEQ ID NO: 125 and a light chain variable region of SEQ ID NO: 129 in either H→L or L→H orientation. In another example, the anti-FXIIa portion is a scFv antibody comprising a heavy chain variable region of SEQ ID NO: 126 and a light chain variable region of SEQ ID NO: 130 in either H→L or L→H orientation.

[0080] In some embodiments, the heavy chain and light chain variable region of any of the scFV antibodies described herein are further connected, e.g., via disulfide bond, such as between a V_{H} residue 44 and a V_{L} 100 residue.

(iii) Format of the anti pKal/anti-FXII bispecific antibodies

[0081] The anti-pKal/anti-FXIIa bispecific antibodies as described herein can be in any format of bispecific antibodies as known in the art, e.g., those described in Klein et al., mAbs 4(6): 653-663, 2012; Kontermann et al., mAbs 4(2): 182-197, 2012; and Coloma et al., Nature Biotechnology 15: 159-163, 1997. In some examples, the bispecific antibody can be a hybrid full-length antibody (also known as a quadroma or trifunctional antibody) comprising one arm (a heavy chain/light chain complex) binding to pKal and another art (a heavy chain/light chain complex) binding to FXII. In some examples, the bispecific antibody is a bispecific Fab′₂, which comprises one Fab fragment binding to pKal and another Fab fragment binding to FXII, or a tri-Fab molecule comprising two copies of a Fab fragment binding to one target antigen (e.g., pKal or FXIIa) and one copy of a Fab fragment binding to the other target antigen (e.g., FXIIa or pKal). Alternatively, the bispecific antibody is a tandem scFv molecule, which comprises at least one copy of a scFv binding to pKal and one copy of another scFv binding to FXIIa. The bispecific antibody described herein can also be a diabody or a single chain diabody as known in the art. Other examples include, but are not limited to, IgG₂, F(ab′)₂, CovX-body, scFv₄-Ig, IgG-scFv, scFv-IgG, DVD-Ig, IgG-sVD, sVD-IgG, 2-in-1-IgG, mAb², Tandemab common LC, kih IgG, kih IgG common LC, CrossMab, kih IgG-scFab, mAb-Fv, charge pairs, SEED-body, Diabody (Db), dsDd, scDb, tandAbs, tandem scFv, triple body, Fab-scFv, and F(ab′)₂-scFv₂. See, e.g., FIG. 2 of Kontermann et al., mAbs 4(2):182-197, 2012.

[0082] In some embodiments, the scaffold of the bispecific antibodies described herein is designed to comprise an IgG antibody portion and a scFv portion, which is fused to the C-terminus of either a heavy chain or a light chain of the IgG portion (e.g., the C-terminus of the heavy chain of the IgG, see, e.g., Coloma, M. J. & Morrison, S. L. Design and production of novel tetravalent bispecific antibodies. Nature Biotechnology. 15(2): 159-163. 1997). The IgG heavy or light chain can be fused with the scFv via a short peptide linker, such as a peptide that is rich in Gly and Ser residues. In one example, the peptide linker comprises the amino acid sequence of SGGGS (SEQ ID NO: 22).

[0083] Such a bispecific antibody can comprise a first polypeptide that comprises a light chain of a first antibody, which comprises a light chain variable region (V_{L}) and a light chain constant region (C_{L}); and a second polypeptide that comprises a fusion protein comprising, from the N-terminus to the C-terminus, a heavy chain of the first antibody, which comprises a heavy chain variable region (V_{H}), a heavy chain constant region (C_{H}) and a second antibody, which can be a single chain antibody. Alternatively, the bispecific antibody can comprise a first polypeptide that comprises a heavy chain of a first antibody, the heavy chain comprising a heavy chain variable region (V_{H}) and a heavy chain constant region (C_{H}) or a portion thereof; and a second polypeptide that comprises a fusion protein comprising, from N-terminus to C-terminus, a light chain of the first antibody, which comprises a light chain variable region (V_{L}) and a light chain constant region (C_{L}), and a second antibody, which is a single chain antibody. In some examples, the first antibody can bind to pKal (e.g., active pKal) and the second antibody can bind to FXII (e.g., FXIIa). In other examples, the first antibody can bind to FXIIa and the second antibody can bind to pKal.

[0084] The C_{L} of the light chain of the first antibody may be any C_{L} known in the art. In some embodiments, the C_{L} is a kappa light chain. In some embodiments, the C_{L} is a lambda light chain. The C_{H} of the heavy chain of the first antibody may be any C_{H} known in the art. In some embodiments, the C_{H} is a gamma heavy chain. Such heavy and light chain constant regions are well known in the art, e.g., as described herein.

[0085] In one example, the bispecific comprises an IgG antibody derived from DX-2930 and a scFv antibody derived from clone 559C-M0071-F06, 559C-M0179-D04, 559C-M0181-C02, 559C-M0180-G03, 559C-M0184-B04, 620I-X0173-A11, 620I-X0173-C07, 620I-X0173-E07, or 620I-X0173-G11, in either H→L or L→H orientation. See above disclosures. An antibody derived from a parent antibody may comprise heavy chain and light chain substantially similar to those of the parent antibody (share at least 80%, 85%, 90%, 95%, or 98% sequence identity). In some examples, such an antibody comprises the same heavy chain and light chain CDRs as the parent antibody. In other examples, such an antibody comprises heavy chain and/or light chain CDRs that are substantially identical to those of the parent antibody, e.g., comprises up to 5, 4, 3, 2, or 1 amino acid residue variations such as conservative amino acid residue substitutions as compared to the CDRs of the parent antibody.

[0086] In some embodiments, the scFv antibody in the bispecific antibody comprises a V_{H} fused to the N-terminus of the V_{L}. In other embodiments, the scFv antibody comprises a V_{H} fused to the C-terminus of the V_{L}. In any of the scFv antibodies described herein, the V_{H} and V_{L} regions can be fused via a linker, such as a peptide linker.

[0087] A peptide linker as described herein can comprise, for example, 1, 2, 3, 4, 5, 6, 7, 8, 9, 10 or more amino acid residues. In some embodiments, the peptide linker can comprise 2-50, 5-25, or 5-20 amino acids. In some embodiments, the peptide linker is SGGGS. In some embodiments, the peptide linker is (G₄S)ₓ, wherein x can be 1, 2, 3, 4, 5, 6, 7, 8, 9, 10, or more. In some embodiments, x is 4.

[0088] Any of the peptide linkers described herein, e.g., the SGGGS (SEQ ID NO: 22) linker or the (GGGGS)₄ (SEQ ID NO: 23) linker, can comprise naturally occurring amino acids and/or non-naturally occurring amino acids. Naturally occurring amino acids include alanine (Ala), arginine (Arg), asparagine (Asn), aspartic acid (Asp), cysteine (Cys), glutamic acid (Glu), glutamine (Gin), glycine (Gly), histidine (His), isoleucine (He), leucine (Leu), lysine (Lys) methionine (Met), ornithine (Orn), phenylalanine (Phe), proline (Pro), serine (Ser), threonine (Thr), tryptophan (Trp), tyrosine (Tyr), and valine (Val). Non-naturally occurring amino acids can include protected amino acids such as naturally occurring amino acids protected with groups such as acetyl, formyl, tosyl, nitro and the like. Non-limiting examples of non-naturally occurring amino acids include azidohomoalanine, homopropargylglycine, homoallylglycine, p-bromophenylalanine, p-iodophenylalanine, azidophenylalanine, acetylphenylalanine or ethynylephenylalanine, amino acids containing an internal alkene such as trans-crotylalkene, serine allyl ether, allyl glycine, propargyl glycine, vinyl glycine, pyrrolysine, N-sigma-o-azidobenzyloxycarbonyl-L-Lysine (AzZLys), N-sigma-propargyloxycarbonyl-L-Lysine, N-sigma-2-azidoethoxycarbonyl-L-Lysine, N-sigma-tert-butyloxycarbonyl-L-Lysine (BocLys), N-sigma-allyloxycarbonyl-L-Lysine (AlocLys), N-sigma-acetyl-L-Lysine (AcLys), N-sigma-benzyloxycarbonyl-L-Lysine (ZLys), N-sigma-cyclopentyloxycarbonyl-L-Lysine (CycLys), N-sigma-D-prolyl-L-Lysine, N-sigma-nicotinoyl-L-Lysine (NicLys), N-sigma-N-Me-anthraniloyl-L-Lysine (NmaLys), N-sigma-biotinyl-L-Lysine, N- sigma-9-fluorenylmethoxycarbonyl-L-Lysine, N-sigma-methyl-L-Lysine, N-sigma-dimethyl-L- Lysine, N-sigma-trimethyl-L-Lysine, N-sigma-isopropyl-L-Lysine, N-sigma-dansyl-L-Lysine, N- sigma-o,p-dinitrophenyl-L-Lysine, N-sigma-p-toluenesulfonyl-L-Lysine, N-sigma-DL-2-amino- 2carboxyethyl-L-Lysine, N-sigma-phenylpyruvamide-L-Lysine, N-sigma-pyruvamide-L-Lysine, azidohomoalanine, homopropargylglycine, homoallylglycine, p-bromophenylalanine, p-iodophenylalanine, azidophenylalanine, acetylphenylalanine or ethynylephenylalanine, amino acids containing and an internal alkene such as trans-crotylalkene, serine allyl ether, allyl glycine, propargyl glycine, and vinyl glycine.

[0089] In some embodiments, the scFv portion of the bispecific antibodies described herein may be engineered to introduce cysteine residues in both the V_{H} and V_{L} chains for formation of one or more disulfide bonds, which may reduce the formation of high molecular weight aggregates. In some examples, a cysteine residue may be introduced into residue 44 of the V_{H} chain. Alternatively or in addition, a cysteine residue may be introduced into residue 100 of the V_{L} chain.

[0090] Exemplary anti-pKal/anti-FXIIa bispecific antibodies include clones X0120-A01, X0120-C01, X0120-E01, X0120-G01, X0121-A03, X0121-C01, X0121-E01, X0121-G01, X0122-A01, X0122-C01, 620I-X0173-A11, 620I-X0173-C07, 620I-X0173-E07, and 620I-X0173-G11 described in Examples below. Other exemplary anti-pKal/anti-FXIIa bispecific antibodies include clones 620I-X138-A08, 620I-X136-B02, 620I-X139-A12, 620I-X137-B08, 620I-X142-A04, 620I-X142-B11, 620I-X138-B01, 620I-X136-C01, 620I-X138-A12, 620I-X136-A12, 620I-X138-A02, 620I-X136-A05, 620I-X138-C07, 620I-X136-E07, 620I-X142-B02, 620I-X136-F11, 620I-X142-A05, 620I-X136-C09, 620I-X138-B10, 620I-X136-C08, 620I-X139-A11, 620I-X136-D05, 620I-X138-D04, 620I-X136-G08, 620I-X142-B07, 620I-X142-A11, 620I-X138-G12, 620I-X142-A10, 620I-X138-D03, 620I-X137-C08, 620I-X142-E02, 620I-X136-E05, 620I-X138-B06, 620I-X136-A09, 620I-X138-A06, 620I-X137-A10, 620I-X139-B10, 620I-X136-A04, 620I-X138-D06, 620I-X136-C11, 620I-X138-B07, 620I-X136-A02, 620I-X139-G02, 620I-X136-B07, 620I-X138-E03, 620I-X136-G05, 620I-X139-D12, 620I-X136-A01, 620I-X138-C12, 620I-X136-G10, 620I-X138-D05, 620I-X136-F07, 620I-X138-A01, 620I-X142-E09, 620I-X138-D11, 620I-X136-C05, 620I-X142-A02, 620I-X136-C04, 620I-X138-F02, 620I-X136-G04, 620I-X139-G12, 620I-X136-B11, 620I-X142-D04, 620I-X136-D06, 620I-X139-A01, 620I-X136-D12, 620I-X138-F05, 620I-X136-A11, 620I-X139-E05, 620I-X136-C12, and 620I-X138-E05 described in the Examples below.

### Preparation of Bispecific Antibodies

[0091] Any suitable methods known in the art, e.g., the standard recombinant technology, can be used for preparing the bispecific antibodies described herein. Examples are provided below.

[0092] Heavy chain and light chain genes of suitable parent antibodies can be obtained via routine technology, e.g., PCR amplification from a suitable source. In one example, DNA encoding a monoclonal antibody specific to a target antigen can be readily isolated and sequenced using conventional procedures (e.g., by using oligonucleotide probes that are capable of binding specifically to genes encoding the heavy and light chains of the monoclonal antibodies). A cell, such as a hybridoma cell, may serve as a source of such DNA. In another example, the sequence of DNA encoding a monoclonal antibody specific for a target antigen may be obtained, e.g., from a database or other publically available source, and the DNA can be synthesized. The parent antibody genes can also be obtained from screening a suitable antibody library with an antigen of interest.

[0093] The antibody heavy and light chain genes thus obtained can be analyzed to identify the complementarity determining regions (CDR) regions following routine technology. Any of the polypeptides in the bispecific antibodies as described herein can be prepared via conventional recombinant technology and inserted into suitable expression vectors for production in suitable host cells.

[0094] The nucleotide sequences encoding one or more of the polypeptides of a bispecific antibody as described herein can be cloned into one expression vector, each nucleotide sequence being in operable linkage to a suitable promoter. Alternatively, the nucleotides sequences can be in operable linkage with a single promoter, such that both sequences are expressed from the same promoter. In some examples, the expression of the two polypeptides is controlled by a common promoter. In other examples, the expression of each of the two polypeptides is under the control of a distinct promoter. In another alternative, the nucleotide sequences encoding the two polypeptides are cloned into two vectors, which can be introduced into the same or different cells. When the two polypeptides are expressed in different cells, each of them can be isolated from the host cells expressing such and the two isolated heavy chains can be mixed and incubated under suitable conditions allowing for the formation of the bispecific antibody.

[0095] Generally, a nucleic acid sequence encoding one or all chains of a bispecific antibody can be cloned into a suitable expression vector in operable linkage with a suitable promoter using methods known in the art. For example, the nucleotide sequence and vector can be contacted, under suitable conditions, with a restriction enzyme to create complementary ends on each molecule that can pair with each other and be joined together with a ligase. Alternatively, synthetic nucleic acid linkers can be ligated to the termini of a gene. These synthetic linkers contain nucleic acid sequences that correspond to a particular restriction site in the vector. The selection of expression vectors/promoter would depend on the type of host cells for use in producing the antibodies.

[0096] A variety of promoters can be used for expression of the bispecific antibodies described herein, including, but not limited to, cytomegalovirus (CMV) intermediate early promoter, a viral LTR such as the Rous sarcoma virus LTR, HIV-LTR, HTLV-1 LTR, the simian virus 40 (SV40) early promoter, E. coli lac UV5 promoter, and the herpes simplex tk virus promoter.

[0097] Regulatable promoters can also be used. Such regulatable promoters include those using the lac repressor from E. coli as a transcription modulator to regulate transcription from lac operator-bearing mammalian cell promoters [Brown, M. et al., Cell, 49: 603-612 (1987)], those using the tetracycline repressor (tetR) [Gossen, M., and Bujard, H., Proc. Natl. Acad. Sci. USA 89: 5547-5551 (1992); Yao, F. et al., Human Gene Therapy, 9: 1939-1950 (1998); Shockelt, P., et al., Proc. Natl. Acad. Sci. USA, 92: 6522-6526 (1995)]. Other systems include FK506 dimer, VP16 or p65 using astradiol, RU486, diphenol murislerone, or rapamycin. Inducible systems are available from Invitrogen, Clontech and Ariad.

[0098] Regulatable promoters that include a repressor with the operon can be used. In one embodiment, the lac repressor from E. coli can function as a transcriptional modulator to regulate transcription from lac operator-bearing mammalian cell promoters [M. Brown et al., Cell, 49: 603-612 (1987)]; Gossen and Bujard (1992); [M. Gossen et al., Natl. Acad. Sci. USA, 89: 5547-5551 (1992)] combined the tetracycline repressor (tetR) with the transcription activator (VP 16) to create a tetR-mammalian cell transcription activator fusion protein, tTa (tetR-VP 16), with the tetO-bearing minimal promoter derived from the human cytomegalovirus (hCMV) major immediate-early promoter to create a tetR-tet operator system to control gene expression in mammalian cells. In one embodiment, a tetracycline inducible switch is used. The tetracycline repressor (tetR) alone, rather than the tetR-mammalian cell transcription factor fusion derivatives can function as potent trans-modulator to regulate gene expression in mammalian cells when the tetracycline operator is properly positioned downstream for the TATA element of the CMVIE promoter (Yao et al., Human Gene Therapy). One particular advantage of this tetracycline inducible switch is that it does not require the use of a tetracycline repressor-mammalian cells transactivator or repressor fusion protein, which in some instances can be toxic to cells (Gossen et al., Natl. Acad. Sci. USA, 89: 5547-5551 (1992); Shockett et al., Proc. Natl. Acad. Sci. USA, 92: 6522-6526 (1995)), to achieve its regulatable effects.

[0099] Additionally, the vector can contain, for example, some or all of the following: a selectable marker gene, such as the neomycin gene for selection of stable or transient transfectants in mammalian cells; enhancer/promoter sequences from the immediate early gene of human CMV for high levels of transcription; transcription termination and RNA processing signals from SV40 for mRNA stability; SV40 polyoma origins of replication and ColE1 for proper episomal replication; internal ribosome binding sites (IRESes), versatile multiple cloning sites; and T7 and SP6 RNA promoters for in vitro transcription of sense and antisense RNA. Suitable vectors and methods for producing vectors containing transgenes are well known and available in the art.

[0100] Examples of polyadenylation signals useful to practice the methods described herein include, but are not limited to, human collagen I polyadenylation signal, human collagen II polyadenylation signal, and SV40 polyadenylation signal.

[0101] Other aspects of the disclosure relate to a method for preparing a bispecific antibody, comprising: culturing a host cell or host cell described herein set under conditions allowing for expression of the first polypeptide and the second polypeptide; and isolating the bispecific antibody that comprises the first polypeptide and the second polypeptide. In some embodiments, the host cell comprises an expression vector comprising a first nucleotide sequence encoding a first polypeptide as described herein and a second nucleotide sequence encoding a second polypeptide as described herein.

[0102] Suitable host cells for use in preparing the bispecific antibodies described herein can be any host cells known in the art that can be used for protein production, including, but not limited to, bacterial cells, yeast cells, insect cells, plant cells, or mammalian cells. The bispecific antibodies described herein can be produced in bacterial cells, e.g., E. coli cells. Alternatively, the bispecific antibodies can be produced in eukaryotic cells. In one embodiment, the antibodies are expressed in a yeast cell such as Pichia (see, e.g., Powers et al., 2001, J. Immunol. Methods. 251: 123-35), Hanseula, or Saccharomyces. In another embodiment, the bispecific antibodies can be produced in mammalian cells. Mammalian host cells for expressing the antibodies include, but are not limited to, 293 cells (see, e.g., ATCC CRL-1573, American Type Culture Collection®, and Expi293F™ cells, Life Technologies™), Chinese Hamster Ovary (CHO cells) (including dhfr-CHO cells, described in Urlaub and Chasin, 1980, Proc. Natl. Acad. Sci. USA 77: 4216-4220, used with a DHFR selectable marker, e.g., as described in Kaufman and Sharp, 1982, Mol. Biol. 159:601 621), lymphocytic cell lines, e.g., NS0 myeloma cells and SP2 cells, COS cells, and a cell from a transgenic animal, e.g., a transgenic mammal. For example, the cell is a mammary epithelial cell.

[0103] In an exemplary system for recombinant expression of a bispecific antibody as described herein, a recombinant expression vector encoding both of the polypeptides in the bispecific antibody is introduced into dhfr CHO cells by calcium phosphate-mediated transfection. Within the recombinant expression vector, the nucleic acids encoding the two polypeptides are operatively linked to enhancer/promoter regulatory elements (e.g., derived from SV40, CMV, adenovirus and the like, such as a CMV enhancer/AdMLP promoter regulatory element or an SV40 enhancer/AdMLP promoter regulatory element) to drive high levels of transcription of the genes. The recombinant expression vector also carries a DHFR gene, which allows for selection of CHO cells that have been transfected with the vector using methotrexate selection/amplification. The selected transformant host cells are cultured to allow for expression of the two polypeptides. The tetrameric molecule formed thereby can be recovered from the culture medium. Another exemplary system for recombinant expression is described in Example 2.

[0104] Standard molecular biology techniques are used to prepare the recombinant expression vector, transfect the host cells, select for transformants, culture the host cells and recover the antibody from the culture medium. For example, some antibodies can be isolated by affinity chromatography with a Protein A or Protein G coupled matrix.

### Utilities of the Bispecific Antibodies

[0105] The bispecific antibodies or the encoding nucleic acids or nucleic acid sets described herein can be used for diagnostic and therapeutic purposes. They also can be used as research tools in basic researches and therapeutic researches.

### (i) Pharmaceutical Compositions

[0106] The bispecific antibody (or the encoding nucleic acids or nucleic acid sets) as described herein can be mixed with a pharmaceutically acceptable carrier (excipient), including buffer, to form a pharmaceutical composition for use in treating a target disease. “Acceptable” means that the carrier must be compatible with the active ingredient of the composition (and preferably, capable of stabilizing the active ingredient) and not deleterious to the subject to be treated. Pharmaceutically acceptable excipients (carriers) including buffers, which are well known in the art. See, e.g., Remington: The Science and Practice of Pharmacy 20th Ed. (2000) Lippincott Williams and Wilkins, Ed. K. E. Hoover.

[0107] The pharmaceutical compositions to be used in the present methods can comprise pharmaceutically acceptable carriers, excipients, or stabilizers in the form of lyophilized formulations or aqueous solutions. (Remington: The Science and Practice of Pharmacy 20th Ed. (2000) Lippincott Williams and Wilkins, Ed. K. E. Hoover). Acceptable carriers, excipients, or stabilizers are nontoxic to recipients at the dosages and concentrations used, and may comprise buffers such as phosphate, citrate, and other organic acids; antioxidants including ascorbic acid and methionine; preservatives (such as octadecyldimethylbenzyl ammonium chloride; hexamethonium chloride; benzalkonium chloride, benzethonium chloride; phenol, butyl or benzyl alcohol; alkyl parabens such as methyl or propyl paraben; catechol; resorcinol; cyclohexanol; 3-pentanol; and m-cresol); low molecular weight (less than about 10 residues) polypeptides; proteins, such as serum albumin, gelatin, or immunoglobulins; hydrophilic polymers such as polyvinylpyrrolidone; amino acids such as glycine, glutamine, asparagine, histidine, arginine, or lysine; monosaccharides, disaccharides, and other carbohydrates including glucose, mannose, or dextrans; chelating agents such as EDTA; sugars such as sucrose, mannitol, trehalose or sorbitol; salt-forming counter-ions such as sodium; metal complexes (e.g. Zn-protein complexes); and/or non-ionic surfactants such as TWEEN™, PLURONICS™ or polyethylene glycol (PEG).

[0108] In some examples, the pharmaceutical composition described herein comprises liposomes containing the bispecific antibody, which can be prepared by methods known in the art, such as described in Epstein, et al., Proc. Natl. Acad. Sci. USA 82: 3688 (1985); Hwang, et al., Proc. Natl. Acad. Sci. USA 77: 4030 (1980); and U.S. Pat. Nos. 4,485,045 and 4,544,545. Liposomes with enhanced circulation time are disclosed in U.S. Pat. No. 5,013,556. Particularly useful liposomes can be generated by the reverse phase evaporation method with a lipid composition comprising phosphatidylcholine, cholesterol and PEG-derivatized phosphatidylethanolamine (PEG-PE). Liposomes are extruded through filters of defined pore size to yield liposomes with the desired diameter.

[0109] The bispecific antibody, or the encoding nucleic acid(s), may also be entrapped in microcapsules prepared, for example, by coacervation techniques or by interfacial polymerization, for example, hydroxymethylcellulose or gelatin-microcapsules and poly-(methylmethacylate) microcapsules, respectively, in colloidal drug delivery systems (for example, liposomes, albumin microspheres, microemulsions, nano-particles and nanocapsules) or in macroemulsions. Such techniques are known in the art, see, e.g., Remington, The Science and Practice of Pharmacy 20th Ed. Mack Publishing (2000).

[0110] In other examples, the pharmaceutical composition described herein can be formulated in sustained-release format. Suitable examples of sustained-release preparations include semipermeable matrices of solid hydrophobic polymers containing the antibody, which matrices are in the form of shaped articles, e.g. films, or microcapsules. Examples of sustained-release matrices include polyesters, hydrogels (for example, poly(2-hydroxyethyl-methacrylate), or poly(v nylalcohol)), polylactides (U.S. Pat. No. 3,773,919), copolymers of L-glutamic acid and 7 ethyl-L-glutamate, non-degradable ethylene-vinyl acetate, degradable lactic acid-glycolic acid copolymers such as the LUPRON DEPOT™ (injectable microspheres composed of lactic acid-glycolic acid copolymer and leuprolide acetate), sucrose acetate isobutyrate, and poly-D-(−)-3-hydroxybutyric acid.

[0111] The pharmaceutical compositions to be used for in vivo administration must be sterile. This is readily accomplished by, for example, filtration through sterile filtration membranes. Therapeutic antibody compositions are generally placed into a container having a sterile access port, for example, an intravenous solution bag or vial having a stopper pierceable by a hypodermic injection needle.

[0112] The pharmaceutical compositions described herein can be in unit dosage forms such as tablets, pills, capsules, powders, granules, solutions or suspensions, or suppositories, for oral, parenteral or rectal administration, or administration by inhalation or insufflation. For preparing solid compositions such as tablets, the principal active ingredient can be mixed with a pharmaceutical carrier, e.g. conventional tableting ingredients such as corn starch, lactose, sucrose, sorbitol, talc, stearic acid, magnesium stearate, dicalcium phosphate or gums, and other pharmaceutical diluents, e.g. water, to form a solid preformulation composition containing a homogeneous mixture of a compound of the present invention, or a non-toxic pharmaceutically acceptable salt thereof. When referring to these preformulation compositions as homogeneous, it is meant that the active ingredient is dispersed evenly throughout the composition so that the composition may be readily subdivided into equally effective unit dosage forms such as tablets, pills and capsules. This solid preformulation composition is then subdivided into unit dosage forms of the type described above containing from 0.1 to about 500 mg of the active ingredient of the present invention. The tablets or pills of the novel composition can be coated or otherwise compounded to provide a dosage form affording the advantage of prolonged action. For example, the tablet or pill can comprise an inner dosage and an outer dosage component, the latter being in the form of an envelope over the former. The two components can be separated by an enteric layer that serves to resist disintegration in the stomach and permits the inner component to pass intact into the duodenum or to be delayed in release. A variety of materials can be used for such enteric layers or coatings, such materials including a number of polymeric acids and mixtures of polymeric acids with such materials as shellac, cetyl alcohol and cellulose acetate.

[0113] Suitable surface-active agents include, in particular, non-ionic agents, such as polyoxyethylenesorbitans (e.g. Tween™ 20, 40, 60, 80 or 85) and other sorbitans (e.g. Span™ 20, 40, 60, 80 or 85). Compositions with a surface-active agent will conveniently comprise between 0.05 and 5% surface-active agent, and can be between 0.1 and 2.5%. It will be appreciated that other ingredients may be added, for example mannitol or other pharmaceutically acceptable vehicles, if necessary.

[0114] Suitable emulsions may be prepared using commercially available fat emulsions, such as Intralipid™, Liposyn™, Infonutrol™, Lipofundin™ and Lipiphysan™. The active ingredient may be either dissolved in a pre-mixed emulsion composition or alternatively it may be dissolved in an oil (e.g. soybean oil, safflower oil, cottonseed oil, sesame oil, corn oil or almond oil) and an emulsion formed upon mixing with a phospholipid (e.g. egg phospholipids, soybean phospholipids or soybean lecithin) and water. It will be appreciated that other ingredients may be added, for example glycerol or glucose, to adjust the tonicity of the emulsion. Suitable emulsions will typically contain up to 20% oil, for example, between 5 and 20%. The fat emulsion can comprise fat droplets between 0.1 and 1.0 .im, particularly 0.1 and 0.5 .im, and have a pH in the range of 5.5 to 8.0.

[0115] The emulsion compositions can be those prepared by mixing a bispecific antibody with Intralipid™ or the components thereof (soybean oil, egg phospholipids, glycerol and water).

[0116] Pharmaceutical compositions for inhalation or insufflation include solutions and suspensions in pharmaceutically acceptable, aqueous or organic solvents, or mixtures thereof, and powders. The liquid or solid compositions may contain suitable pharmaceutically acceptable excipients as set out above. In some embodiments, the compositions are administered by the oral or nasal respiratory route for local or systemic effect.

[0117] Compositions in preferably sterile pharmaceutically acceptable solvents may be nebulised by use of gases. Nebulised solutions may be breathed directly from the nebulising device or the nebulising device may be attached to a face mask, tent or intermittent positive pressure breathing machine. Solution, suspension or powder compositions may be administered, preferably orally or nasally, from devices which deliver the formulation in an appropriate manner.

### (ii) Disease Treatment

[0118] The bispecific antibodies (or the encoding nucleic acids or nucleic acid sets) described herein are useful for treating a disease or disorder associated one or both of the antigens to which the bispecific antibody binds. For example, if the bispecific antibody is capable of binding to and blocking the activity of pKal and FXIIa, it can be used for treating diseases associated with dysregulation of the contact activation system, e.g., HAE and thrombosis.

[0119] HAE (including Type I, Type II, and Type III HAE) is a disorder characterized by recurrent episodes of severe swelling at, e.g., the limbs, face, intestinal tract, and airway. HAE attach may be triggered by minor trauma or stress. Swelling the intestinal tract due to HAE attack can cause severe abdominal pain, nausea, and vomiting. Swelling in the airway can restrict breathing and lead to life-threatening obstruction of the airway.

[0120] Thrombosis (e.g., venous thrombosis or arterial thrombosis) refers to the formation of blood clots inside a blood vessel, which may obstruct the flow of blood through the circulation system. Thrombosis may include thrombosis associated with atrial fibrillation, DVT, pulmonary embolism, stroke, or other arterial or venous thrombotic events

[0121] To practice the method disclosed herein, an effective amount of the pharmaceutical composition described above can be administered to a subject (e.g., a human) in need of the treatment via a suitable route, such as intravenous administration, e.g., as a bolus or by continuous infusion over a period of time, by intramuscular, intraperitoneal, intracerebrospinal, subcutaneous, intra-articular, intrasynovial, intrathecal, oral, inhalation or topical routes. Commercially available nebulizers for liquid formulations, including jet nebulizers and ultrasonic nebulizers are useful for administration. Liquid formulations can be directly nebulized and lyophilized powder can be nebulized after reconstitution. Alternatively, the bispecific antibodies as described herein can be aerosolized using a fluorocarbon formulation and a metered dose inhaler, or inhaled as a lyophilized and milled powder.

[0122] The subject to be treated by the methods described herein can be a mammal, more preferably a human. Mammals include, but are not limited to, farm animals, sport animals, pets, primates, horses, dogs, cats, mice and rats. A human subject who needs the treatment may be a human patient having, at risk for, or suspected of having a target disease/disorder, such as HAE or thrombosis. In some embodiments, thrombosis is associated with atrial fibrillation, deep vein thrombosis (DVT), pulmonary embolism, stroke, or an arterial or venous thrombotic event. A subject having a target disease or disorder can be identified by routine medical examination, e.g., laboratory tests, organ functional tests, CT scans, or ultrasounds. A subject suspected of having any of such target disease/disorder might show one or more symptoms of the disease/disorder. A subject at risk for the disease/disorder can be a subject having one or more of the risk factors for that disease/disorder.

[0123] “An effective amount” as used herein refers to the amount of each active agent required to confer therapeutic effect on the subject, either alone or in combination with one or more other active agents. Effective amounts vary, as recognized by those skilled in the art, depending on the particular condition being treated, the severity of the condition, the individual patient parameters including age, physical condition, size, gender and weight, the duration of the treatment, the nature of concurrent therapy (if any), the specific route of administration and like factors within the knowledge and expertise of the health practitioner. These factors are well known to those of ordinary skill in the art and can be addressed with no more than routine experimentation. It is generally preferred that a maximum dose of the individual components or combinations thereof be used, that is, the highest safe dose according to sound medical judgment. It will be understood by those of ordinary skill in the art, however, that a patient may insist upon a lower dose or tolerable dose for medical reasons, psychological reasons or for virtually any other reasons.

[0124] Empirical considerations, such as the half-life, generally will contribute to the determination of the dosage. For example, antibodies that are compatible with the human immune system, such as humanized antibodies or fully human antibodies, may be used to prolong half-life of the antibody and to prevent the antibody being attacked by the host's immune system. Frequency of administration may be determined and adjusted over the course of therapy, and is generally, but not necessarily, based on treatment and/or suppression and/or amelioration and/or delay of a target disease/disorder. Alternatively, sustained continuous release formulations of a bispecific antibody may be appropriate. Various formulations and devices for achieving sustained release are known in the art.

[0125] In one example, dosages for a bispecific antibody as described herein may be determined empirically in individuals who have been given one or more administration(s) of the antibody. Individuals are given incremental dosages of the antagonist. To assess efficacy of the antagonist, an indicator of the disease/disorder can be followed.

[0126] Generally, for administration of any of the antibodies described herein, an initial candidate dosage can be about 2 mg/kg. For the purpose of the present disclosure, a typical daily dosage might range from about any of 0.1 μg/kg to 3 μg/kg to 30 μg/kg to 300 μg/kg to 3 mg/kg, to 30 mg/kg to 100 mg/kg or more, depending on the factors mentioned above. For repeated administrations over several days or longer, depending on the condition, the treatment is sustained until a desired suppression of symptoms occurs or until sufficient therapeutic levels are achieved to alleviate a target disease or disorder, or a symptom thereof. An exemplary dosing regimen comprises administering an initial dose of about 2 mg/kg, followed by a weekly maintenance dose of about 1 mg/kg of the antibody, or followed by a maintenance dose of about 1 mg/kg every other week. However, other dosage regimens may be useful, depending on the pattern of pharmacokinetic decay that the practitioner wishes to achieve. For example, dosing from one-four times a week is contemplated. In some embodiments, dosing ranging from about 3 μg/mg to about 2 mg/kg (such as about 3 μg/mg, about 10 μg/mg, about 30 μg/mg, about 100 μg/mg, about 300 μg/mg, about 1 mg/kg, and about 2 mg/kg) may be used. In some embodiments, dosing frequency is once every week, every 2 weeks, every 4 weeks, every 5 weeks, every 6 weeks, every 7 weeks, every 8 weeks, every 9 weeks, or every 10 weeks; or once every month, every 2 months, or every 3 months, or longer. The progress of this therapy is easily monitored by conventional techniques and assays. The dosing regimen (including the antibody used) can vary over time.

[0127] In some embodiments, for an adult patient of normal weight, doses ranging from about 0.3 to 5.00 mg/kg may be administered. The particular dosage regimen, i.e., dose, timing and repetition, will depend on the particular individual and that individual's medical history, as well as the properties of the individual agents (such as the half-life of the agent, and other considerations well known in the art).

[0128] For the purpose of the present disclosure, the appropriate dosage of a bispecific antibody as described herein will depend on the specific antibody (or compositions thereof) employed, the type and severity of the disease/disorder, whether the antibody is administered for preventive or therapeutic purposes, previous therapy, the patient's clinical history and response to the antagonist, and the discretion of the attending physician. Typically the clinician will administer a bispecific antibody, until a dosage is reached that achieves the desired result. Administration of one or more bispecific antibody can be continuous or intermittent, depending, for example, upon the recipient's physiological condition, whether the purpose of the administration is therapeutic or prophylactic, and other factors known to skilled practitioners. The administration of a bispecific antibody may be essentially continuous over a preselected period of time or may be in a series of spaced dose, e.g., either before, during, or after developing a target disease or disorder.

[0129] As used herein, the term “treating” refers to the application or administration of a composition including one or more active agents to a subject, who has a target disease or disorder, a symptom of the disease/disorder, or a predisposition toward the disease/disorder, with the purpose to cure, heal, alleviate, relieve, alter, remedy, ameliorate, improve, or affect the disorder, the symptom of the disease, or the predisposition toward the disease or disorder.

[0130] Alleviating a target disease/disorder includes delaying the development or progression of the disease, or reducing disease severity. Alleviating the disease does not necessarily require curative results. As used therein, “delaying” the development of a target disease or disorder means to defer, hinder, slow, retard, stabilize, and/or postpone progression of the disease. This delay can be of varying lengths of time, depending on the history of the disease and/or individuals being treated. A method that “delays” or alleviates the development of a disease, or delays the onset of the disease, is a method that reduces probability of developing one or more symptoms of the disease in a given time frame and/or reduces extent of the symptoms in a given time frame, when compared to not using the method. Such comparisons are typically based on clinical studies, using a number of subjects sufficient to give a statistically significant result.

[0131] “Development” or “progression” of a disease means initial manifestations and/or ensuing progression of the disease. Development of the disease can be detectable and assessed using standard clinical techniques as well known in the art. However, development also refers to progression that may be undetectable. For purpose of this disclosure, development or progression refers to the biological course of the symptoms. “Development” includes occurrence, recurrence, and onset. As used herein “onset” or “occurrence” of a target disease or disorder includes initial onset and/or recurrence.

[0132] In some embodiments, the bispecific antibody described herein is administered to a subject in need of the treatment at an amount sufficient to inhibit the activity of one or both of the target antigen by at least 20% (e.g., 30%, 40%, 50%, 60%, 70%, 80%, 90% or greater) in vivo. In other embodiments, the antibody is administered in an amount effective in reducing the level of one or both target antigens by at least 20% (e.g., 30%, 40%, 50%, 60%, 70%, 80%, 90% or greater).

[0133] Conventional methods, known to those of ordinary skill in the art of medicine, can be used to administer the pharmaceutical composition to the subject, depending upon the type of disease to be treated or the site of the disease. This composition can also be administered via other conventional routes, e.g., administered orally, parenterally, by inhalation spray, topically, rectally, nasally, buccally, vaginally or via an implanted reservoir. The term “parenteral” as used herein includes subcutaneous, intracutaneous, intravenous, intramuscular, intraarticular, intraarterial, intrasynovial, intrasternal, intrathecal, intralesional, and intracranial injection or infusion techniques. In addition, it can be administered to the subject via injectable depot routes of administration such as using 1-, 3-, or 6-month depot injectable or biodegradable materials and methods.

[0134] Injectable compositions may contain various carriers such as vegetable oils, dimethylactamide, dimethyformamide, ethyl lactate, ethyl carbonate, isopropyl myristate, ethanol, and polyols (glycerol, propylene glycol, liquid polyethylene glycol, and the like). For intravenous injection, water soluble antibodies can be administered by the drip method, whereby a pharmaceutical formulation containing the antibody and a physiologically acceptable excipients is infused. Physiologically acceptable excipients may include, for example, 5% dextrose, 0.9% saline, Ringer's solution or other suitable excipients. Intramuscular preparations, e.g., a sterile formulation of a suitable soluble salt form of the antibody, can be dissolved and administered in a pharmaceutical excipient such as Water-for-Injection, 0.9% saline, or 5% glucose solution.

[0135] In one embodiment, a bispecific antibody is administered via site-specific or targeted local delivery techniques. Examples of site-specific or targeted local delivery techniques include various implantable depot sources of the bispecific antibody or local delivery catheters, such as infusion catheters, an indwelling catheter, or a needle catheter, synthetic grafts, adventitial wraps, shunts and stents or other implantable devices, site specific carriers, direct injection, or direct application. See, e.g., PCT Publication No. WO 00/53211 and U.S. Pat. No. 5,981,568.

[0136] Targeted delivery of therapeutic compositions containing an antisense polynucleotide, expression vector, or subgenomic polynucleotides can also be used. Receptor-mediated DNA delivery techniques are described in, for example, Findeis et al., Trends Biotechnol. (1993) 11: 202; Chiou et al., Gene Therapeutics: Methods And Applications Of Direct Gene Transfer (J. A. Wolff, ed.) (1994); Wu et al., J. Biol. Chem. (1988) 263: 621; Wu et al., J. Biol. Chem. (1994) 269: 542; Zenke et al., Proc. Natl. Acad. Sci. USA (1990) 87: 3655; Wu et al., J. Biol. Chem. (1991) 266: 338.

[0137] Therapeutic compositions containing a polynucleotide (e.g., those encoding the bispecific antibodies described herein) are administered in a range of about 100 ng to about 200 mg of DNA for local administration in a gene therapy protocol. In some embodiments, concentration ranges of about 500 ng to about 50 mg, about 1 μg to about 2 mg, about 5 μg to about 500 μg, and about 20 μg to about 100 μg of DNA or more can also be used during a gene therapy protocol.

[0138] The therapeutic polynucleotides and polypeptides described herein can be delivered using gene delivery vehicles. The gene delivery vehicle can be of viral or non-viral origin (see generally, Jolly, Cancer Gene Therapy (1994) 1: 51; Kimura, Human Gene Therapy (1994) 5: 845; Connelly, Human Gene Therapy (1995) 1: 185; and Kaplitt, Nature Genetics (1994) 6: 148). Expression of such coding sequences can be induced using endogenous mammalian or heterologous promoters and/or enhancers. Expression of the coding sequence can be either constitutive or regulated.

[0139] Viral-based vectors for delivery of a desired polynucleotide and expression in a desired cell are well known in the art. Exemplary viral-based vehicles include, but are not limited to, recombinant retroviruses (see, e.g., PCT Publication Nos. WO 90/07936; WO 94/03622; WO 93/25698; WO 93/25234; WO 93/11230; WO 93/10218; WO 91/02805; U.S. Pat. Nos. 5,219,740 and 4,777,127; GB Patent No. 2,200,651; and EP Patent No. 0 345 242), alphavirus-based vectors (e.g., Sindbis virus vectors, Semliki forest virus (ATCC VR-67; ATCC VR-1247), Ross River virus (ATCC VR-373; ATCC VR-1246) and Venezuelan equine encephalitis virus (ATCC VR-923; ATCC VR-1250; ATCC VR 1249; ATCC VR-532)), and adeno-associated virus (AAV) vectors (see, e.g., PCT Publication Nos. WO 94/12649, WO 93/03769; WO 93/19191; WO 94/28938; WO 95/11984 and WO 95/00655). Administration of DNA linked to killed adenovirus as described in Curiel, Hum. Gene Ther. (1992) 3: 147 can also be employed.

[0140] Non-viral delivery vehicles and methods can also be employed, including, but not limited to, polycationic condensed DNA linked or unlinked to killed adenovirus alone (see, e.g., Curiel, Hum. Gene Ther. (1992) 3: 147); ligand-linked DNA (see, e.g., Wu, J. Biol. Chem. (1989) 264: 16985); eukaryotic cell delivery vehicles cells (see, e.g., U.S. Pat. No. 5,814,482; PCT Publication Nos. WO 95/07994; WO 96/17072; WO 95/30763; and WO 97/42338) and nucleic charge neutralization or fusion with cell membranes. Naked DNA can also be employed. Exemplary naked DNA introduction methods are described in PCT Publication No. WO 90/11092 and U.S. Pat. No. 5,580,859. Liposomes that can act as gene delivery vehicles are described in U.S. Pat. No. 5,422,120; PCT Publication Nos. WO 95/13796; WO 94/23697; WO 91/14445; and EP Patent No. 0524968. Additional approaches are described in Philip, Mol. Cell. Biol. (1994) 14:2411, and in Woffendin, Proc. Natl. Acad. Sci. (1994) 91:1581.

[0141] The particular dosage regimen, i.e., dose, timing and repetition, used in the method described herein will depend on the particular subject and that subject's medical history. In some embodiments, more than one bispecific antibodies, or a combination of a bispecific antibody and another suitable therapeutic agent, may be administered to a subject in need of the treatment. The bispecific antibody can also be used in conjunction with other agents that serve to enhance and/or complement the effectiveness of the agents.

[0142] Treatment efficacy for a target disease/disorder can be assessed by methods well-known in the art.

### Kits For Use in Treating Target Diseases

[0143] The present disclosure also provides kits for use in alleviating target diseases or disorders. Such kits can include one or more containers comprising one or more of the bispecific antibodies and/or one or more the isolated nucleic acids or nucleic acid sets described herein.

[0144] In some embodiments, the kit can comprise instructions for use in accordance with any of the methods described herein. The included instructions can comprise a description of administration of the bispecific antibody to treat, delay the onset, or alleviate a target disease such as HAE or thrombosis. The kit may further comprise a description of selecting an individual suitable for treatment based on identifying whether that individual has the target disease. In still other embodiments, the instructions comprise a description of administering an antibody to an individual at risk of the target disease.

[0145] The instructions relating to the use of a bispecific antibody as described herein generally include information as to dosage, dosing schedule, and route of administration for the intended treatment. The containers may be unit doses, bulk packages (e.g., multi-dose packages) or sub-unit doses. Instructions supplied in the kits of the invention are typically written instructions on a label or package insert (e.g., a paper sheet included in the kit), but machine-readable instructions (e.g., instructions carried on a magnetic or optical storage disk) are also acceptable.

[0146] The label or package insert indicates that the composition is used for treating, delaying the onset and/or alleviating a target disease or disorder. Instructions may be provided for practicing any of the methods described herein.

[0147] The kits of this invention are in suitable packaging. Suitable packaging includes, but is not limited to, vials, bottles, jars, flexible packaging (e.g., sealed Mylar or plastic bags), and the like. Also contemplated are packages for use in combination with a specific device, such as an inhaler, nasal administration device (e.g., an atomizer) or an infusion device such as a minipump. A kit may have a sterile access port (for example the container may be an intravenous solution bag or a vial having a stopper pierceable by a hypodermic injection needle). The container may also have a sterile access port (for example the container may be an intravenous solution bag or a vial having a stopper pierceable by a hypodermic injection needle). At least one active agent in the composition is a bispecific antibody as those described herein.

[0148] Kits may optionally provide additional components such as buffers and interpretive information. Normally, the kit comprises a container and a label or package insert(s) on or associated with the container. In some embodiments, the invention provides articles of manufacture comprising contents of the kits described above.

### General Techniques

[0149] The practice of the present invention will employ, unless otherwise indicated, conventional techniques of molecular biology (including recombinant techniques), microbiology, cell biology, biochemistry and immunology, which are within the skill of the art. Such techniques are explained fully in the literature, such as, Molecular Cloning: A Laboratory Manual, second edition (Sambrook, et al., 1989) Cold Spring Harbor Press; Oligonucleotide Synthesis (M. J. Gait, ed., 1984); Methods in Molecular Biology, Humana Press; Cell Biology: A Laboratory Notebook (J. E. Cellis, ed., 1998) Academic Press; Animal Cell Culture (R. I. Freshney, ed., 1987); Introduction to Cell and Tissue Culture (J. P. Mather and P. E. Roberts, 1998) Plenum Press; Cell and Tissue Culture: Laboratory Procedures (A. Doyle, J. B. Griffiths, and D. G. Newell, eds., 1993-8) J. Wiley and Sons; Methods in Enzymology (Academic Press, Inc.); Handbook of Experimental Immunology (D. M. Weir and C. C. Blackwell, eds.); Gene Transfer Vectors for Mammalian Cells (J. M. Miller and M. P. Calos, eds., 1987); Current Protocols in Molecular Biology (F. M. Ausubel, et al., eds., 1987); PCR: The Polymerase Chain Reaction, (Mullis, et al., eds., 1994); Current Protocols in Immunology (J. E. Coligan et al., eds., 1991); Short Protocols in Molecular Biology (Wiley and Sons, 1999); Immunobiology (C. A. Janeway and P. Travers, 1997); Antibodies (P. Finch, 1997); Antibodies: a practical approach (D. Catty., ed., IRL Press, 1988-1989); Monoclonal antibodies: a practical approach (P. Shepherd and C. Dean, eds., Oxford University Press, 2000); Using antibodies: a laboratory manual (E. Harlow and D. Lane (Cold Spring Harbor Laboratory Press, 1999); The Antibodies (M. Zanetti and J. D. Capra, eds., Harwood Academic Publishers, 1995).

[0150] Without further elaboration, it is believed that one skilled in the art can, based on the above description, utilize the present invention to its fullest extent. The following specific embodiments are, therefore, to be construed as merely illustrative, and not limitative of the remainder of the disclosure in any way whatsoever. All publications cited herein are incorporated by reference for the purposes or subject matter referenced herein.

### EXAMPLE 1

### Construction and Characterization of Exemplary Bispecific Antibodies that Bind pKal and Factor XIIa

[0151] A number of exemplary anti-pKal/anti-FXIIa bispecific antibodies, including clones X0120-A01, X0120-C01, X0120-E01, X0120-G01, X0121-A03, X0121-C01, X0121-E01, X0121-G01, X0122-A01, and X0122-C01, were constructed, using DX-2930 and one of anti-FXIIa clones 559C-M0071-F06, 559C-M0184-B04, 559C-M0179-D04, 559C-M0181-C02 and 559C-M0180-G03 as the parent antibodies. See Table 2 below:

TABLE 2
Components of Exemplary Bispecific Antibodies

| Bispecific | | |
|---|---|---|
| Antibody | Anti-pKal | |
| Clones | portion | Anti-FXIIa portion |
| X0120-A01 | DX-2930 | scFv of clone 559C-M0184-B04 (H→L) fused |
| | (IgG) | to the C-terminus of the heavy chain of DX- |
| | | 2930 |
| X0120-C01 | DX-2930 | scFv of clone 559C-M0184-B04 (L→H) fused |
| | (IgG) | to the C-terminus of the heavy chain of DX- |
| | | 2930 |
| X0120-E01 | DX-2930 | scFv of clone 559C-M0179-D04 (H→L) fused |
| | (IgG) | to the C-terminus of the heavy chain of DX- |
| | | 2930 |
| X0120-G01, | DX-2930 | scFv of clone 559C-M0179-D04 (L→H) fused |
| | (IgG) | to the C-terminus of the heavy chain of DX- |
| | | 2930 |
| X0121-A03 | DX-2930 | scFv of clone 559C-M0181-C02 (H→L) fused |
| | (IgG) | to the C-terminus of the heavy chain of DX- |
| | | 2930 |
| X0121-C01 | DX-2930 | scFv of clone 559C-M0181-C02 (L→H) fused |
| | (IgG) | to the C-terminus of the heavy chain of DX- |
| | | 2930 |
| X0121-E01 | DX-2930 | scFv of clone 559C-M0180-G03 (H→L) fused |
| | (IgG) | to the C-terminus of the heavy chain of DX- |
| | | 2930 |
| X0121-G01 | DX-2930 | scFv of clone 559C-M0180-G03 (L→H) fused |
| | (IgG) | to the C-terminus of the heavy chain of DX- |
| | | 2930 |
| X0122-A01, | DX-2930 | scFv of clone 559C-M0071-F06 (H→L) fused |
| | (IgG) | to the C-terminus of the heavy chain of DX- |
| | | 2930 |
| X0122-C01 | DX-2930 | scFv of clone 559C-M0071-F06 (L→H) fused |
| | (IgG) | to the C-terminus of the heavy chain of DX- |
| | | 2930 |

[0152] Among the anti-FXIIa clones, 559C-M0071-F06 is a parental clone, 559C-M0184-B04 is obtained from HCDR1+2 Affinity maturation, and 559C-M0179-D04, 559C-M0181-C02, and 559C-M0180-G03 are clones obtained from light chain affinity maturation.

[0153] All of the exemplary bispecific antibodies clones listed in Table 2 above are tetravalent molecules comprising four polypeptide chains, including two polypeptide chains of the light chain of DX-2930 (SEQ ID NO: 10 provided above), and two fusion polypeptide chains of the heavy chain of DX-2930 (excluding a Lysine residue in the hinge domain of the constant chain) fused to a scFv chain of one of the FXIIa clones. The scFv chain of each of the 5 anti-FXIIa clones was synthesized in both the Heavy-Light (H→L) orientation and Light-Heavy orientation (L→H). In all examples of the scFv chains, an internal (GGGGS)₄ linker (SEQ ID NO: 23) was used. The scFvs were constructed such that clones in the Light-Heavy orientation contained the initial two amino acids (RT) that initiate the constant region before the linker sequence begins. The clones in the Heavy-Light orientation contained only the first amino acid (R) from the light constant region before the stop codons.

[0154] The amino acid sequences of the fusion polypeptides of each of the exemplary bispecific antibodies are provided below:

Bispecific antibody clone X0120-A01 Heavy
Chain-ScFv Fusion (SEQ ID NO: 11):
MGWSCIILFLVATATGAHSEVQLLESGGGLVQPGGSLRLSCAASGFTFSH
YIMMWVRQAPGKGLEWVSGIYSSGGITVYADSVKGRFTISRDNSKNTLYL
QMNSLRAEDTAVYYCAYRRIGVPRRDEFDIWGQGTMVTVSSASTKGPSVF
PLAPSSKSTSGGTAALGCLVKDYFPEPVTVSWNSGALTSGVHTFPAVLQS
SGLYSLSSVVTVPSSSLGTQTYICNVNHKPSNTKVDKRVEPKSCDTHTCP
PCPAPELLGGPSVFLFPPKPKDTLMISRTPEVTCVVVDVSHEDPEVKFNW
YVDGVEVHNAKTKPREEQYNSTYRVVSVLTVLHQDWLNGKEYKCKVSNKA
LPAPIEKTISKAKGQPREPQVYTLPPSREEMTKNQVSLTCLVKGFYPSDI
AVEWESNGQPENNYKTTPPVLDSDGSFFLYSKLTVDKSRWQQGNVFSCSV
MHEALHNHYTQKSLSLSPGKSGGGSEVQLLESGGGLVQPGGSLRLSCAAS
GFTFSFYSMHWVRQAPGKGLEWVSRIYPSGGVTKYADSVKGRFTISRDNS
KNTLYLQMNSLRAEDTAVYYCTRQRYRGPKYYYYMDVWGKGTTVTVSSGG
GGSGGGGSGGGGSGGGGSDIQMTQSPLSLPVTPGEPASISCRSSQSLLHS
NGYNYLDWYLQKPGQSPQLLIYLGSNRASGVPDRFSGSGSGTDFTLKISR
VEAEDVGVYYCMQALQTPWTFGQGTKVEIKR
Bispecific antibody clone X0120-C01 Heavy
Chain-ScFv Fusion (SEQ ID NO: 12):
MGWSCIILFLVATATGAHSEVQLLESGGGLVQPGGSLRLSCAASGFTFSH
YIMMWVRQAPGKGLEWVSGIYSSGGITVYADSVKGRFTISRDNSKNTLYL
QMNSLRAEDTAVYYCAYRRIGVPRRDEFDIWGQGTMVTVSSASTKGPSVF
PLAPSSKSTSGGTAALGCLVKDYFPEPVTVSWNSGALTSGVHTFPAVLQS
SGLYSLSSVVTVPSSSLGTQTYICNVNHKPSNTKVDKRVEPKSCDTHTCP
PCPAPELLGGPSVFLFPPKPKDTLMISRTPEVTCVVVDVSHEDPEVKFNW
YVDGVEVHNAKTKPREEQYNSTYRVVSVLTVLHQDWLNGKEYKCKVSNKA
LPAPIEKTISKAKGQPREPQVYTLPPSREEMTKNQVSLTCLVKGFYPSDI
AVEWESNGQPENNYKTTPPVLDSDGSFFLYSKLTVDKSRWQQGNVFSCSV
MHEALHNHYTQKSLSLSPGKSGGGSDIQMTQSPLSLPVTPGEPASISCRS
SQSLLHSNGYNYLDWYLQKPGQSPQLLIYLGSNRASGVPDRFSGSGSGTD
FTLKISRVEAEDVGVYYCMQALQTPWTFGQGTKVEIKRTGGGGSGGGGSG
GGGSGGGGSEVQLLESGGGLVQPGGSLRLSCAASGFTFSFYSMHWVRQAP
GKGLEWVSRIYPSGGVTKYADSVKGRFTISRDNSKNTLYLQMNSLRAEDT
AVYYCTRQRYRGPKYYYYMDVWGKGTTVTVSS
Bispecific antibody clone X0120-E01 Heavy
Chain-ScFv Fusion (SEQ ID NO: 13):
MGWSCIILFLVATATGAHSEVQLLESGGGLVQPGGSLRLSCAASGFTFSH
YIMMWVRQAPGKGLEWVSGIYSSGGITVYADSVKGRFTISRDNSKNTLYL
QMNSLRAEDTAVYYCAYRRIGVPRRDEFDIWGQGTMVTVSSASTKGPSVF
PLAPSSKSTSGGTAALGCLVKDYFPEPVTVSWNSGALTSGVHTFPAVLQS
SGLYSLSSVVTVPSSSLGTQTYICNVNHKPSNTKVDKRVEPKSCDTHTCP
PCPAPELLGGPSVFLFPPKPKDTLMISRTPEVTCVVVDVSHEDPEVKFNW
YVDGVEVHNAKTKPREEQYNSTYRVVSVLTVLHQDWLNGKEYKCKVSNKA
LPAPIEKTISKAKGQPREPQVYTLPPSREEMTKNQVSLTCLVKGFYPSDI
AVEWESNGQPENNYKTTPPVLDSDGSFFLYSKLTVDKSRWQQGNVFSCSV
MHEALHNHYTQKSLSLSPGKSGGGSEVQLLESGGGLVQPGGSLRLSCAAS
GFTFSGYIMAWVRQAPGKGLEWVSYIYPSGGITVYADSVKGRFTISRDNS
KNTLYLQMNSLRAEDTAVYYCTRQRYRGPKYYYYMDVWGKGTTVTVSSGG
GGSGGGGSGGGGSGGGGSDIQMTQSPLSLSVAPGEPASISCRSSQSLLHR
NGHNYLDWYLQKPGQSPQLLIYLGSNRASGVPERFSGSGSGTDFTLRISR
VEAEDVGVYYCMQALQARTFGQGTKVEIKR
Bispecific antibody clone X0120-G01 Heavy
Chain-ScFv Fusion (SEQ ID NO: 14):
MGWSCIILFLVATATGAHSEVQLLESGGGLVQPGGSLRLSCAASGFTFSH
YIMMWVRQAPGKGLEWVSGIYSSGGITVYADSVKGRFTISRDNSKNTLYL
QMNSLRAEDTAVYYCAYRRIGVPRRDEFDIWGQGTMVTVSSASTKGPSVF
PLAPSSKSTSGGTAALGCLVKDYFPEPVTVSWNSGALTSGVHTFPAVLQS
SGLYSLSSVVTVPSSSLGTQTYICNVNHKPSNTKVDKRVEPKSCDTHTCP
PCPAPELLGGPSVFLFPPKPKDTLMISRTPEVTCVVVDVSHEDPEVKFNW
YVDGVEVHNAKTKPREEQYNSTYRVVSVLTVLHQDWLNGKEYKCKVSNKA
LPAPIEKTISKAKGQPREPQVYTLPPSREEMTKNQVSLTCLVKGFYPSDI
AVEWESNGQPENNYKTTPPVLDSDGSFFLYSKLTVDKSRWQQGNVFSCSV
MHEALHNHYTQKSLSLSPGKSGGGSDIQMTQSPLSLSVAPGEPASISCRS
SQSLLHRNGHNYLDWYLQKPGQSPQLLIYLGSNRASGVPERFSGSGSGTD
FTLRISRVEAEDVGVYYCMQALQARTFGQGTKVEIKRTGGGGSGGGGSGG
GGSGGGGSEVQLLESGGGLVQPGGSLRLSCAASGFTFSGYIMAWVRQAPG
KGLEWVSYIYPSGGITVYADSVKGRFTISRDNSKNTLYLQMNSLRAEDTA
VYYCTRQRYRGPKYYYYMDVWGKGTTVTVSS
Bispecific antibody clone X0121-A03 Heavy
Chain-ScFv Fusion (SEQ ID NO: 15):
MGWSCIILFLVATATGAHSEVQLLESGGGLVQPGGSLRLSCAASGFTFSH
YIMMWVRQAPGKGLEWVSGIYSSGGITVYADSVKGRFTISRDNSKNTLYL
QMNSLRAEDTAVYYCAYRRIGVPRRDEFDIWGQGTMVTVSSASTKGPSVF
PLAPSSKSTSGGTAALGCLVKDYFPEPVTVSWNSGALTSGVHTFPAVLQS
SGLYSLSSVVTVPSSSLGTQTYICNVNHKPSNTKVDKRVEPKSCDTHTCP
PCPAPELLGGPSVFLFPPKPKDTLMISRTPEVTCVVVDVSHEDPEVKFNW
YVDGVEVHNAKTKPREEQYNSTYRVVSVLTVLHQDWLNGKEYKCKVSNKA
LPAPIEKTISKAKGQPREPQVYTLPPSREEMTKNQVSLTCLVKGFYPSDI
AVEWESNGQPENNYKTTPPVLDSDGSFFLYSKLTVDKSRWQQGNVFSCSV
MHEALHNHYTQKSLSLSPGKSGGGSEVQLLESGGGLVQPGGSLRLSCAAS
GFTFSGYIMAWVRQAPGKGLEWVSYIYPSGGITVYADSVKGRFTISRDNS
KNTLYLQMNSLRAEDTAVYYCTRQRYRGPKYYYYMDVWGKGTTVTVSSGG
GGSGGGGSGGGGSGGGGSDIQMTQSPLSLPVTPGEPASISCRSSQSLLHS
NGYNYLDWYLQKPGQSPQLLIYLGSNRASGVPDRFSGSGSGTDFTLKISR
VEAEDVGVYYCMQALQTRTFGQGTKVEIKR
Bispecific antibody clone X0121-C01 Heavy
Chain-ScFv Fusion (SEQ ID NO: 16):
MGWSCIILFLVATATGAHSEVQLLESGGGLVQPGGSLRLSCAASGFTFSH
YIMMWVRQAPGKGLEWVSGIYSSGGITVYADSVKGRFTISRDNSKNTLYL
QMNSLRAEDTAVYYCAYRRIGVPRRDEFDIWGQGTMVTVSSASTKGPSVF
PLAPSSKSTSGGTAALGCLVKDYFPEPVTVSWNSGALTSGVHTFPAVLQS
SGLYSLSSVVTVPSSSLGTQTYICNVNHKPSNTKVDKRVEPKSCDTHTCP
PCPAPELLGGPSVFLFPPKPKDTLMISRTPEVTCVVVDVSHEDPEVKFNW
YVDGVEVHNAKTKPREEQYNSTYRVVSVLTVLHQDWLNGKEYKCKVSNKA
LPAPIEKTISKAKGQPREPQVYTLPPSREEMTKNQVSLTCLVKGFYPSDI
AVEWESNGQPENNYKTTPPVLDSDGSFFLYSKLTVDKSRWQQGNVFSCSV
MHEALHNHYTQKSLSLSPGKSGGGSDIQMTQSPLSLPVTPGEPASISCRS
SQSLLHSNGYNYLDWYLQKPGQSPQLLIYLGSNRASGVPDRFSGSGSGTD
FTLKISRVEAEDVGVYYCMQALQTRTFGQGTKVEIKRTGGGGSGGGGSGG
GGSGGGGSEVQLLESGGGLVQPGGSLRLSCAASGFTFSGYIMAWVRQAPG
KGLEWVSYIYPSGGITVYADSVKGRFTISRDNSKNTLYLQMNSLRAEDTA
VYYCTRQRYRGPKYYYYMDVWGKGTTVTVSS
Bispecific antibody clone X0121-E01 Heavy
Chain-ScFv Fusion (SEQ ID NO: 17):
MGWSCIILFLVATATGAHSEVQLLESGGGLVQPGGSLRLSCAASGFTFSH
YIMMWVRQAPGKGLEWVSGIYSSGGITVYADSVKGRFTISRDNSKNTLYL
QMNSLRAEDTAVYYCAYRRIGVPRRDEFDIWGQGTMVTVSSASTKGPSVF
PLAPSSKSTSGGTAALGCLVKDYFPEPVTVSWNSGALTSGVHTFPAVLQS
SGLYSLSSVVTVPSSSLGTQTYICNVNHKPSNTKVDKRVEPKSCDTHTCP
PCPAPELLGGPSVFLFPPKPKDTLMISRTPEVTCVVVDVSHEDPEVKFNW
YVDGVEVHNAKTKPREEQYNSTYRVVSVLTVLHQDWLNGKEYKCKVSNKA
LPAPIEKTISKAKGQPREPQVYTLPPSREEMTKNQVSLTCLVKGFYPSDI
AVEWESNGQPENNYKTTPPVLDSDGSFFLYSKLTVDKSRWQQGNVFSCSV
MHEALHNHYTQKSLSLSPGKSGGGSEVQLLESGGGLVQPGGSLRLSCAAS
GFTFSGYIMAWVRQAPGKGLEWVSYIYPSGGITVYADSVKGRFTISRDNS
KNTLYLQMNSLRAEDTAVYYCTRQRYRGPKYYYYMDVWGKGTTVTVSSGG
GGSGGGGSGGGGSGGGGSDIQMTQSPLSLPVTPGEPASISCRSSQSLLHS
NGYNYLDWYLQKPGQSPQIMIYLGSNRASGVPDRFSGSGSGTDFTLKISR
VEAEDVGVYYCMQALQTPRTFGQGTKVEIKR
Bispecific antibody clone X0121-G01 Heavy
Chain-ScFv Fusion (SEQ ID NO: 18):
MGWSCIILFLVATATGAHSEVQLLESGGGLVQPGGSLRLSCAASGFTFSH
YIMMWVRQAPGKGLEWVSGIYSSGGITVYADSVKGRFTISRDNSKNTLYL
QMNSLRAEDTAVYYCAYRRIGVPRRDEFDIWGQGTMVTVSSASTKGPSVF
PLAPSSKSTSGGTAALGCLVKDYFPEPVTVSWNSGALTSGVHTFPAVLQS
SGLYSLSSVVTVPSSSLGTQTYICNVNHKPSNTKVDKRVEPKSCDTHTCP
PCPAPELLGGPSVFLFPPKPKDTLMISRTPEVTCVVVDVSHEDPEVKFNW
YVDGVEVHNAKTKPREEQYNSTYRVVSVLTVLHQDWLNGKEYKCKVSNKA
LPAPIEKTISKAKGQPREPQVYTLPPSREEMTKNQVSLTCLVKGFYPSDI
AVEWESNGQPENNYKTTPPVLDSDGSFFLYSKLTVDKSRWQQGNVFSCSV
MHEALHNHYTQKSLSLSPGKSGGGSDIQMTQSPLSLPVTPGEPASISCRS
SQSLLHSNGYNYLDWYLQKPGQSPQIMIYLGSNRASGVPDRFSGSGSGTD
FTLKISRVEAEDVGVYYCMQALQTPRTFGQGTKVEIKRTGGGGSGGGGSG
GGGSGGGGSEVQLLESGGGLVQPGGSLRLSCAASGFTFSGYIMAWVRQAP
GKGLEWVSYIYPSGGITVYADSVKGRFTISRDNSKNTLYLQMNSLRAEDT
AVYYCTRQRYRGPKYYYYMDVWGKGTTVTVSS
Bispecific antibody clone X0122-A01 Heavy
Chain-ScFv Fusion (SEQ ID NO: 19):
MGWSCIILFLVATATGAHSEVQLLESGGGLVQPGGSLRLSCAASGFTFSH
YIMMWVRQAPGKGLEWVSGIYSSGGITVYADSVKGRFTISRDNSKNTLYL
QMNSLRAEDTAVYYCAYRRIGVPRRDEFDIWGQGTMVTVSSASTKGPSVF
PLAPSSKSTSGGTAALGCLVKDYFPEPVTVSWNSGALTSGVHTFPAVLQS
SGLYSLSSVVTVPSSSLGTQTYICNVNHKPSNTKVDKRVEPKSCDTHTCP
PCPAPELLGGPSVFLFPPKPKDTLMISRTPEVTCVVVDVSHEDPEVKFNW
YVDGVEVHNAKTKPREEQYNSTYRVVSVLTVLHQDWLNGKEYKCKVSNKA
LPAPIEKTISKAKGQPREPQVYTLPPSREEMTKNQVSLTCLVKGFYPSDI
AVEWESNGQPENNYKTTPPVLDSDGSFFLYSKLTVDKSRWQQGNVFSCSV
MHEALHNHYTQKSLSLSPGKSGGGSEVQLLESGGGLVQPGGSLRLSCAAS
GFTFSGYIMAWVRQAPGKGLEWVSYIYPSGGITVYADSVKGRFTISRDNS
KNTLYLQMNSLRAEDTAVYYCTRQRYRGPKYYYYMDVWGKGTTVTVSSGG
GGSGGGGSGGGGSGGGGSDIQMTQSPLSLPVTPGEPASISCRSSQSLLHS
NGYNYLDWYLQKPGQSPQLLIYLGSNRASGVPDRFSGSGSGTDFTLKISR
VEAEDVGVYYCMQALQTPWTFGQGTKVEIKR
Bispecific antibody clone X0122-C01 Heavy
Chain-ScFv Fusion (SEQ ID NO: 20):
MGWSCIILFLVATATGAHSEVQLLESGGGLVQPGGSLRLSCAASGFTFSH
YIMMWVRQAPGKGLEWVSGIYSSGGITVYADSVKGRFTISRDNSKNTLYL
QMNSLRAEDTAVYYCAYRRIGVPRRDEFDIWGQGTMVTVSSASTKGPSVF
PLAPSSKSTSGGTAALGCLVKDYFPEPVTVSWNSGALTSGVHTFPAVLQS
SGLYSLSSVVTVPSSSLGTQTYICNVNHKPSNTKVDKRVEPKSCDTHTCP
PCPAPELLGGPSVFLFPPKPKDTLMISRTPEVTCVVVDVSHEDPEVKFNW
YVDGVEVHNAKTKPREEQYNSTYRVVSVLTVLHQDWLNGKEYKCKVSNKA
LPAPIEKTISKAKGQPREPQVYTLPPSREEMTKNQVSLTCLVKGFYPSDI
AVEWESNGQPENNYKTTPPVLDSDGSFFLYSKLTVDKSRWQQGNVFSCSV
MHEALHNHYTQKSLSLSPGKSGGGSDIQMTQSPLSLPVTPGEPASISCRS
SQSLLHSNGYNYLDWYLQKPGQSPQLLIYLGSNRASGVPDRFSGSGSGTD
FTLKISRVEAEDVGVYYCMQALQTPWTFGQGTKVEIKRTGGGGSGGGGSG
GGGSGGGGSEVQLLESGGGLVQPGGSLRLSCAASGFTFSGYIMAWVRQAP
GKGLEWVSYIYPSGGITVYADSVKGRFTISRDNSKNTLYLQMNSLRAEDT
AVYYCTRQRYRGPKYYYYMDVWGKGTTVTVSS

[0155] To construct the expression cassette for the exemplary bispecific antibodies described above, the coding sequences for the heavy and light chains of DX-2930 were cloned into a pRh1-CHO vector, modified with a C-terminal SGGGS linker that connects to the scFv coding sequence. The linker region contained a BamHI restriction site for efficient cloning of the scFvs. Five anti-Factor XIIa clones were selected for insertion into the construct via BamHI/XbaI restriction sites.

[0156] The italicized portions of the sequences provided above refer to the signal peptides. The anti-pKal portion of the bispecific antibody disclosed herein may include the same signal peptides, or may have the signal peptides removed or replaced with a different signal peptide. Signal peptides for use in producing secretory proteins are well known in the art.

[0157] The nucleotide sequences encoding the bispecific antibodies (in cis-tronic operon format) are provided below:

X0120-A01

(SEQ ID NO: 24)

ATGGGATGGTCCTGCATCATCCTGTTTCTGGTGGCTACAGCCACAGGCGT
GCACTCCGACATCCAGATGACCCAGTCCCCCTCCACCCTGTCCGCCTCTG
TGGGCGACAGAGTGACCATCACCTGTCGGGCCTCCCAGTCCATCTCCAGC
TGGCTGGCCTGGTATCAGCAGAAGCCCGGCAAGGCCCCCAAGCTGCTGAT
CTACAAGGCCAGCACCCTGGAATCCGGCGTGCCCTCCAGATTCTCCGGCT
CTGGCTCCGGCACCGAGTTCACCCTGACCATCAGCTCCCTGCAGCCCGAC
GACTTCGCCACCTACTACTGCCAGCAGTACAACACCTACTGGACCTTCGG
CCAGGGCACCAAGGTGGAAATCAAGCGGACCGTGGCCGCTCCCTCCGTGT
TCATCTTCCCACCCTCCGACGAGCAGCTGAAGTCCGGCACCGCCTCCGTG
GTCTGCCTGCTGAACAACTTCTACCCCCGCGAGGCCAAGGTGCAGTGGAA
GGTGGACAACGCCCTGCAGTCCGGCAACTCCCAGGAATCCGTGACCGAGC
AGGACTCCAAGGACAGCACCTACTCCCTGTCCTCTACCCTGACCCTGTCC
AAGGCCGACTACGAGAAGCACAAGGTGTACGCCTGCGAAGTGACCCACCA
GGGCCTGTCCAGCCCCGTGACCAAGTCCTTCAACCGGGGCGAGTGCTGAT
GAGGCGCGCCTTCGCGTCGAGCATGCATCTAGGGCGGCCAATTCCGCCCC
TCTCCCCCCCCCCCCCTAACGTTACTGGCCGAAGCCGCTTGGAATAAGGC
CGGTGTGCGTTTGTCTATATGTTATTTTCCACCATATTGCCGTCTTTTGG
CAATGTGAGGGCCCGGAAACCTGGCCCTGTCTTCTTGACGAGCATTCCTA
GGGGTCTTTCCCCTCTCGCCAAAGGAATGCAAGGTCTGTTGAATGTCGTG
AAGGAAGCAGTTCCTCTGGAAGCTTCTTGAAGACAAACAACGTCTGTAGC
GACCCTTTGCAGGCAGCGGAACCCCCCACCTGGCGACAGGTGCCTCTGCG
GCCAAAAGCCACGTGTATAAGATACACCTGCAAAGGCGGCACAACCCCAG
TGCCACGTTGTGAGTTGGATAGTTGTGGAAAGAGTCAAATGGCTCTCTTC
AAGCGTATTCAACAAGGGGCTGAAGGATGCCCAGAAGGTACCCCATTGTA
TGGGATCTGATCTGGGGCCTCGGTGCAGATGCTTTACATGTGTTTAGTCG
AGGTTAAAAAAACGTCTAGGCCCCCCGAACCACGGGGACGTGGTTTTCCT
TTGAAAAACACGATGATAATATGGCCACAACCATGGGATGGTCCTGCATC
ATCCTGTTTCTGGTGGCCACAGCCACAGGCGCTCACTCCGAGGTGCAATT
GCTGGAATCCGGCGGAGGACTGGTGCAGCCTGGCGGCTCCCTGAGACTGT
CTTGCGCCGCCTCCGGCTTCACCTTCTCCCACTACATCATGATGTGGGTG
CGACAGGCTCCTGGCAAGGGGCTGGAATGGGTGTCCGGCATCTACTCCTC
CGGCGGCATCACCGTGTACGCCGACTCCGTGAAGGGCCGGTTCACCATCT
CTCGGGACAACTCCAAGAACACCCTGTACCTGCAGATGAACTCCCTGCGG
GCCGAGGACACCGCCGTGTACTACTGCGCCTACCGGCGGATCGGCGTGCC
CAGACGGGACGAGTTCGACATCTGGGGGCAGGGCACCATGGTGACAGTGT
CCTCCGCCTCCACCAAGGGCCCCTCTGTGTTCCCGCTAGCACCCTCCAGC
AAGTCCACCTCCGGCGGCACCGCTGCTCTGGGCTGCCTCGTCAAGGACTA
CTTCCCCGAGCCCGTGACCGTGTCCTGGAACTCTGGCGCCCTGACCAGCG
GAGTGCATACCTTCCCTGCCGTGCTCCAGTCCTCCGGCCTGTACAGCCTG
TCCTCTGTCGTGACCGTGCCCTCCAGCTCCCTGGGCACCCAGACCTACAT
CTGCAACGTGAACCACAAGCCCTCCAACACCAAAGTGGACAAGCGGGTGG
AACCCAAGTCCTGCGACACCCACACCTGTCCCCCTTGCCCTGCCCCTGAA
CTGCTGGGCGGACCCAGCGTGTTCCTGTTCCCCCCAAAGCCCAAGGACAC
CCTGATGATCTCCCGGACCCCCGAAGTGACCTGCGTGGTGGTGGACGTGT
CCCACGAGGACCCTGAAGTGAAGTTTAATTGGTACGTGGACGGCGTGGAA
GTGCATAACGCCAAGACCAAGCCCAGAGAGGAACAGTACAACTCCACCTA
CCGGGTGGTGTCCGTGCTGACCGTGCTGCACCAGGACTGGCTGAACGGCA
AAGAGTACAAGTGCAAGGTGTCCAACAAGGCCCTGCCTGCCCCCATCGAA
AAGACCATCAGCAAGGCCAAGGGCCAGCCTCGCGAGCCCCAGGTGTACAC
CCTGCCCCCTAGCCGGGAAGAGATGACCAAGAACCAGGTGTCCCTGACCT
GTCTGGTCAAGGGCTTCTACCCCTCCGATATCGCCGTGGAATGGGAGTCC
AACGGCCAGCCCGAGAACAACTACAAGACCACCCCCCCTGTGCTGGACAG
CGACGGCTCATTCTTCCTGTACTCCAAGCTGACCGTGGACAAGTCCCGGT
GGCAGCAGGGCAACGTGTTCTCCTGCTCCGTGATGCACGAGGCCCTGCAC
AACCACTACACCCAGAAGTCCCTGTCCCTGTCTCCCGGCAAGTCTGGCGG
AGGATCCGAAGTGCAGCTGCTGGAAAGCGGCGGAGGCCTGGTGCAGCCTG
GAGGCAGCCTGAGACTGTCTTGCGCTGCCAGCGGCTTCACCTTCAGCTTC
TACAGCATGCACTGGGTCCGACAGGCTCCAGGCAAGGGCCTGGAATGGGT
GTCCCGGATCTACCCCTCTGGCGGCGTGACCAAATACGCCGACAGCGTGA
AGGGCCGGTTCACCATCAGCCGGGACAACAGCAAGAACACCCTGTACCTG
CAGATGAACAGCCTGCGGGCCGAGGACACCGCCGTGTACTACTGCACCCG
GCAGCGGTACAGAGGCCCCAAGTACTACTACTACATGGACGTGTGGGGCA
AGGGCACAACCGTGACCGTGTCTAGCGGAGGCGGAGGATCTGGCGGAGGT
GGAAGTGGTGGTGGCGGAAGTGGCGGAGGCGGCAGCGACATCCAGATGAC
CCAGAGCCCCCTGAGCCTGCCCGTGACACCTGGCGAGCCTGCCAGCATCA
GCTGCAGAAGCAGCCAGAGCCTGCTGCACAGCAACGGCTACAACTACCTG
GACTGGTATCTGCAGAAGCCCGGCCAGTCCCCCCAGCTGCTGATCTACCT
GGGCAGCAACAGAGCCAGCGGCGTGCCCGACAGATTCAGCGGCAGCGGCT
CCGGCACCGACTTCACCCTGAAGATCAGCCGGGTGGAAGCCGAGGACGTG
GGCGTGTACTATTGCATGCAGGCCCTGCAGACCCCCTGGACCTTCGGCCA
GGGCACCAAGGTGGAAATCAAGAGATGAATCTAGA
X0120-C01

(SEQ ID NO: 25)

ATGGGATGGTCCTGCATCATCCTGTTTCTGGTGGCTACAGCCACAGGCGT
GCACTCCGACATCCAGATGACCCAGTCCCCCTCCACCCTGTCCGCCTCTG
TGGGCGACAGAGTGACCATCACCTGTCGGGCCTCCCAGTCCATCTCCAGC
TGGCTGGCCTGGTATCAGCAGAAGCCCGGCAAGGCCCCCAAGCTGCTGAT
CTACAAGGCCAGCACCCTGGAATCCGGCGTGCCCTCCAGATTCTCCGGCT
CTGGCTCCGGCACCGAGTTCACCCTGACCATCAGCTCCCTGCAGCCCGAC
GACTTCGCCACCTACTACTGCCAGCAGTACAACACCTACTGGACCTTCGG
CCAGGGCACCAAGGTGGAAATCAAGCGGACCGTGGCCGCTCCCTCCGTGT
TCATCTTCCCACCCTCCGACGAGCAGCTGAAGTCCGGCACCGCCTCCGTG
GTCTGCCTGCTGAACAACTTCTACCCCCGCGAGGCCAAGGTGCAGTGGAA
GGTGGACAACGCCCTGCAGTCCGGCAACTCCCAGGAATCCGTGACCGAGC
AGGACTCCAAGGACAGCACCTACTCCCTGTCCTCTACCCTGACCCTGTCC
AAGGCCGACTACGAGAAGCACAAGGTGTACGCCTGCGAAGTGACCCACCA
GGGCCTGTCCAGCCCCGTGACCAAGTCCTTCAACCGGGGCGAGTGCTGAT
GAGGCGCGCCTTCGCGTCGAGCATGCATCTAGGGCGGCCAATTCCGCCCC
TCTCCCCCCCCCCCCCTAACGTTACTGGCCGAAGCCGCTTGGAATAAGGC
CGGTGTGCGTTTGTCTATATGTTATTTTCCACCATATTGCCGTCTTTTGG
CAATGTGAGGGCCCGGAAACCTGGCCCTGTCTTCTTGACGAGCATTCCTA
GGGGTCTTTCCCCTCTCGCCAAAGGAATGCAAGGTCTGTTGAATGTCGTG
AAGGAAGCAGTTCCTCTGGAAGCTTCTTGAAGACAAACAACGTCTGTAGC
GACCCTTTGCAGGCAGCGGAACCCCCCACCTGGCGACAGGTGCCTCTGCG
GCCAAAAGCCACGTGTATAAGATACACCTGCAAAGGCGGCACAACCCCAG
TGCCACGTTGTGAGTTGGATAGTTGTGGAAAGAGTCAAATGGCTCTCTTC
AAGCGTATTCAACAAGGGGCTGAAGGATGCCCAGAAGGTACCCCATTGTA
TGGGATCTGATCTGGGGCCTCGGTGCAGATGCTTTACATGTGTTTAGTCG
AGGTTAAAAAAACGTCTAGGCCCCCCGAACCACGGGGACGTGGTTTTCCT
TTGAAAAACACGATGATAATATGGCCACAACCATGGGATGGTCCTGCATC
ATCCTGTTTCTGGTGGCCACAGCCACAGGCGCTCACTCCGAGGTGCAATT
GCTGGAATCCGGCGGAGGACTGGTGCAGCCTGGCGGCTCCCTGAGACTGT
CTTGCGCCGCCTCCGGCTTCACCTTCTCCCACTACATCATGATGTGGGTG
CGACAGGCTCCTGGCAAGGGGCTGGAATGGGTGTCCGGCATCTACTCCTC
CGGCGGCATCACCGTGTACGCCGACTCCGTGAAGGGCCGGTTCACCATCT
CTCGGGACAACTCCAAGAACACCCTGTACCTGCAGATGAACTCCCTGCGG
GCCGAGGACACCGCCGTGTACTACTGCGCCTACCGGCGGATCGGCGTGCC
CAGACGGGACGAGTTCGACATCTGGGGGCAGGGCACCATGGTGACAGTGT
CCTCCGCCTCCACCAAGGGCCCCTCTGTGTTCCCGCTAGCACCCTCCAGC
AAGTCCACCTCCGGCGGCACCGCTGCTCTGGGCTGCCTCGTCAAGGACTA
CTTCCCCGAGCCCGTGACCGTGTCCTGGAACTCTGGCGCCCTGACCAGCG
GAGTGCATACCTTCCCTGCCGTGCTCCAGTCCTCCGGCCTGTACAGCCTG
TCCTCTGTCGTGACCGTGCCCTCCAGCTCCCTGGGCACCCAGACCTACAT
CTGCAACGTGAACCACAAGCCCTCCAACACCAAAGTGGACAAGCGGGTGG
AACCCAAGTCCTGCGACACCCACACCTGTCCCCCTTGCCCTGCCCCTGAA
CTGCTGGGCGGACCCAGCGTGTTCCTGTTCCCCCCAAAGCCCAAGGACAC
CCTGATGATCTCCCGGACCCCCGAAGTGACCTGCGTGGTGGTGGACGTGT
CCCACGAGGACCCTGAAGTGAAGTTTAATTGGTACGTGGACGGCGTGGAA
GTGCATAACGCCAAGACCAAGCCCAGAGAGGAACAGTACAACTCCACCTA
CCGGGTGGTGTCCGTGCTGACCGTGCTGCACCAGGACTGGCTGAACGGCA
AAGAGTACAAGTGCAAGGTGTCCAACAAGGCCCTGCCTGCCCCCATCGAA
AAGACCATCAGCAAGGCCAAGGGCCAGCCTCGCGAGCCCCAGGTGTACAC
CCTGCCCCCTAGCCGGGAAGAGATGACCAAGAACCAGGTGTCCCTGACCT
GTCTGGTCAAGGGCTTCTACCCCTCCGATATCGCCGTGGAATGGGAGTCC
AACGGCCAGCCCGAGAACAACTACAAGACCACCCCCCCTGTGCTGGACAG
CGACGGCTCATTCTTCCTGTACTCCAAGCTGACCGTGGACAAGTCCCGGT
GGCAGCAGGGCAACGTGTTCTCCTGCTCCGTGATGCACGAGGCCCTGCAC
AACCACTACACCCAGAAGTCCCTGTCCCTGTCTCCCGGCAAGTCTGGCGG
AGGATCCGACATCCAGATGACCCAGAGCCCCCTGAGCCTGCCCGTGACAC
CTGGCGAGCCTGCCAGCATCAGCTGCAGAAGCAGCCAGAGCCTGCTGCAC
AGCAACGGCTACAACTACCTGGACTGGTATCTGCAGAAGCCCGGCCAGTC
CCCCCAGCTGCTGATCTACCTGGGCAGCAACAGAGCCAGCGGCGTGCCCG
ACAGATTCAGCGGCAGCGGCTCCGGCACCGACTTCACCCTGAAGATCAGC
CGGGTCGAAGCCGAGGACGTGGGCGTGTACTACTGCATGCAGGCCCTGCA
GACCCCCTGGACCTTCGGCCAGGGCACCAAGGTGGAAATCAAGCGGACAG
GCGGCGGAGGCTCTGGCGGAGGTGGAAGCGGAGGCGGAGGAAGTGGCGGA
GGCGGCTCTGAGGTGCAGCTGCTGGAATCTGGAGGCGGACTGGTGCAGCC
TGGCGGCAGCCTGAGACTGTCTTGCGCTGCCAGCGGCTTCACCTTCAGCT
TCTACAGCATGCACTGGGTCCGACAGGCCCCTGGCAAGGGCCTGGAATGG
GTGTCCCGGATCTACCCCTCTGGCGGCGTGACCAAATACGCCGACAGCGT
GAAGGGCCGGTTCACCATCAGCCGGGACAACAGCAAGAACACCCTGTACC
TGCAGATGAACAGCCTGCGGGCCGAGGACACCGCCGTGTACTATTGCACC
CGGCAGCGGTACAGAGGCCCCAAGTACTACTACTACATGGACGTGTGGGG
CAAGGGCACCACCGTGACCGTGTCCAGCTGAATCTAGA
X0120-E01

(SEQ ID NO: 26)

ATGGGATGGTCCTGCATCATCCTGTTTCTGGTGGCTACAGCCACAGGCGT
GCACTCCGACATCCAGATGACCCAGTCCCCCTCCACCCTGTCCGCCTCTG
TGGGCGACAGAGTGACCATCACCTGTCGGGCCTCCCAGTCCATCTCCAGC
TGGCTGGCCTGGTATCAGCAGAAGCCCGGCAAGGCCCCCAAGCTGCTGAT
CTACAAGGCCAGCACCCTGGAATCCGGCGTGCCCTCCAGATTCTCCGGCT
CTGGCTCCGGCACCGAGTTCACCCTGACCATCAGCTCCCTGCAGCCCGAC
GACTTCGCCACCTACTACTGCCAGCAGTACAACACCTACTGGACCTTCGG
CCAGGGCACCAAGGTGGAAATCAAGCGGACCGTGGCCGCTCCCTCCGTGT
TCATCTTCCCACCCTCCGACGAGCAGCTGAAGTCCGGCACCGCCTCCGTG
GTCTGCCTGCTGAACAACTTCTACCCCCGCGAGGCCAAGGTGCAGTGGAA
GGTGGACAACGCCCTGCAGTCCGGCAACTCCCAGGAATCCGTGACCGAGC
AGGACTCCAAGGACAGCACCTACTCCCTGTCCTCTACCCTGACCCTGTCC
AAGGCCGACTACGAGAAGCACAAGGTGTACGCCTGCGAAGTGACCCACCA
GGGCCTGTCCAGCCCCGTGACCAAGTCCTTCAACCGGGGCGAGTGCTGAT
GAGGCGCGCCTTCGCGTCGAGCATGCATCTAGGGCGGCCAATTCCGCCCC
TCTCCCCCCCCCCCCCTAACGTTACTGGCCGAAGCCGCTTGGAATAAGGC
CGGTGTGCGTTTGTCTATATGTTATTTTCCACCATATTGCCGTCTTTTGG
CAATGTGAGGGCCCGGAAACCTGGCCCTGTCTTCTTGACGAGCATTCCTA
GGGGTCTTTCCCCTCTCGCCAAAGGAATGCAAGGTCTGTTGAATGTCGTG
AAGGAAGCAGTTCCTCTGGAAGCTTCTTGAAGACAAACAACGTCTGTAGC
GACCCTTTGCAGGCAGCGGAACCCCCCACCTGGCGACAGGTGCCTCTGCG
GCCAAAAGCCACGTGTATAAGATACACCTGCAAAGGCGGCACAACCCCAG
TGCCACGTTGTGAGTTGGATAGTTGTGGAAAGAGTCAAATGGCTCTCTTC
AAGCGTATTCAACAAGGGGCTGAAGGATGCCCAGAAGGTACCCCATTGTA
TGGGATCTGATCTGGGGCCTCGGTGCAGATGCTTTACATGTGTTTAGTCG
AGGTTAAAAAAACGTCTAGGCCCCCCGAACCACGGGGACGTGGTTTTCCT
TTGAAAAACACGATGATAATATGGCCACAACCATGGGATGGTCCTGCATC
ATCCTGTTTCTGGTGGCCACAGCCACAGGCGCTCACTCCGAGGTGCAATT
GCTGGAATCCGGCGGAGGACTGGTGCAGCCTGGCGGCTCCCTGAGACTGT
CTTGCGCCGCCTCCGGCTTCACCTTCTCCCACTACATCATGATGTGGGTG
CGACAGGCTCCTGGCAAGGGGCTGGAATGGGTGTCCGGCATCTACTCCTC
CGGCGGCATCACCGTGTACGCCGACTCCGTGAAGGGCCGGTTCACCATCT
CTCGGGACAACTCCAAGAACACCCTGTACCTGCAGATGAACTCCCTGCGG
GCCGAGGACACCGCCGTGTACTACTGCGCCTACCGGCGGATCGGCGTGCC
CAGACGGGACGAGTTCGACATCTGGGGGCAGGGCACCATGGTGACAGTGT
CCTCCGCCTCCACCAAGGGCCCCTCTGTGTTCCCGCTAGCACCCTCCAGC
AAGTCCACCTCCGGCGGCACCGCTGCTCTGGGCTGCCTCGTCAAGGACTA
CTTCCCCGAGCCCGTGACCGTGTCCTGGAACTCTGGCGCCCTGACCAGCG
GAGTGCATACCTTCCCTGCCGTGCTCCAGTCCTCCGGCCTGTACAGCCTG
TCCTCTGTCGTGACCGTGCCCTCCAGCTCCCTGGGCACCCAGACCTACAT
CTGCAACGTGAACCACAAGCCCTCCAACACCAAAGTGGACAAGCGGGTGG
AACCCAAGTCCTGCGACACCCACACCTGTCCCCCTTGCCCTGCCCCTGAA
CTGCTGGGCGGACCCAGCGTGTTCCTGTTCCCCCCAAAGCCCAAGGACAC
CCTGATGATCTCCCGGACCCCCGAAGTGACCTGCGTGGTGGTGGACGTGT
CCCACGAGGACCCTGAAGTGAAGTTTAATTGGTACGTGGACGGCGTGGAA
GTGCATAACGCCAAGACCAAGCCCAGAGAGGAACAGTACAACTCCACCTA
CCGGGTGGTGTCCGTGCTGACCGTGCTGCACCAGGACTGGCTGAACGGCA
AAGAGTACAAGTGCAAGGTGTCCAACAAGGCCCTGCCTGCCCCCATCGAA
AAGACCATCAGCAAGGCCAAGGGCCAGCCTCGCGAGCCCCAGGTGTACAC
CCTGCCCCCTAGCCGGGAAGAGATGACCAAGAACCAGGTGTCCCTGACCT
GTCTGGTCAAGGGCTTCTACCCCTCCGATATCGCCGTGGAATGGGAGTCC
AACGGCCAGCCCGAGAACAACTACAAGACCACCCCCCCTGTGCTGGACAG
CGACGGCTCATTCTTCCTGTACTCCAAGCTGACCGTGGACAAGTCCCGGT
GGCAGCAGGGCAACGTGTTCTCCTGCTCCGTGATGCACGAGGCCCTGCAC
AACCACTACACCCAGAAGTCCCTGTCCCTGTCTCCCGGCAAGTCTGGCGG
AGGATCCGAAGTGCAGCTGCTGGAAAGCGGCGGAGGACTGGTGCAGCCTG
GCGGCTCCCTGAGACTGTCTTGCGCCGCCAGCGGCTTCACCTTCAGCGGC
TACATCATGGCCTGGGTCCGACAGGCTCCAGGCAAGGGCCTGGAATGGGT
GTCCTACATCTACCCCAGCGGCGGCATCACCGTGTACGCCGACAGCGTGA
AGGGCCGGTTCACCATCAGCCGGGACAACAGCAAGAACACCCTGTACCTG
CAGATGAACAGCCTGCGGGCCGAGGACACCGCCGTGTACTACTGCACCCG
GCAGCGGTACAGAGGCCCCAAGTACTACTACTACATGGACGTGTGGGGCA
AGGGCACCACCGTGACCGTGTCTAGCGGAGGCGGAGGATCTGGCGGAGGT
GGAAGTGGTGGTGGCGGAAGTGGCGGCGGAGGCAGCGACATCCAGATGAC
CCAGAGCCCCCTGAGCCTGAGCGTGGCACCTGGCGAGCCTGCCAGCATCA
GCTGCAGAAGCAGCCAGAGCCTGCTGCACCGGAACGGCCACAACTACCTG
GACTGGTATCTGCAGAAGCCCGGCCAGTCCCCCCAGCTGCTGATCTACCT
GGGCAGCAACAGAGCCAGCGGCGTGCCCGAGAGATTCAGCGGCAGCGGCT
CCGGCACCGACTTCACCCTGCGGATCAGCCGGGTGGAAGCCGAGGACGTG
GGCGTGTACTATTGCATGCAGGCTCTGCAGGCCAGAACCTTCGGCCAGGG
CACCAAGGTGGAAATCAAGAGATGAATCTAGA
X0120-G01

(SEQ ID NO: 27)

ATGGGATGGTCCTGCATCATCCTGTTTCTGGTGGCTACAGCCACAGGCGT
GCACTCCGACATCCAGATGACCCAGTCCCCCTCCACCCTGTCCGCCTCTG
TGGGCGACAGAGTGACCATCACCTGTCGGGCCTCCCAGTCCATCTCCAGC
TGGCTGGCCTGGTATCAGCAGAAGCCCGGCAAGGCCCCCAAGCTGCTGAT
CTACAAGGCCAGCACCCTGGAATCCGGCGTGCCCTCCAGATTCTCCGGCT
CTGGCTCCGGCACCGAGTTCACCCTGACCATCAGCTCCCTGCAGCCCGAC
GACTTCGCCACCTACTACTGCCAGCAGTACAACACCTACTGGACCTTCGG
CCAGGGCACCAAGGTGGAAATCAAGCGGACCGTGGCCGCTCCCTCCGTGT
TCATCTTCCCACCCTCCGACGAGCAGCTGAAGTCCGGCACCGCCTCCGTG
GTCTGCCTGCTGAACAACTTCTACCCCCGCGAGGCCAAGGTGCAGTGGAA
GGTGGACAACGCCCTGCAGTCCGGCAACTCCCAGGAATCCGTGACCGAGC
AGGACTCCAAGGACAGCACCTACTCCCTGTCCTCTACCCTGACCCTGTCC
AAGGCCGACTACGAGAAGCACAAGGTGTACGCCTGCGAAGTGACCCACCA
GGGCCTGTCCAGCCCCGTGACCAAGTCCTTCAACCGGGGCGAGTGCTGAT
GAGGCGCGCCTTCGCGTCGAGCATGCATCTAGGGCGGCCAATTCCGCCCC
TCTCCCCCCCCCCCCCTAACGTTACTGGCCGAAGCCGCTTGGAATAAGGC
CGGTGTGCGTTTGTCTATATGTTATTTTCCACCATATTGCCGTCTTTTGG
CAATGTGAGGGCCCGGAAACCTGGCCCTGTCTTCTTGACGAGCATTCCTA
GGGGTCTTTCCCCTCTCGCCAAAGGAATGCAAGGTCTGTTGAATGTCGTG
AAGGAAGCAGTTCCTCTGGAAGCTTCTTGAAGACAAACAACGTCTGTAGC
GACCCTTTGCAGGCAGCGGAACCCCCCACCTGGCGACAGGTGCCTCTGCG
GCCAAAAGCCACGTGTATAAGATACACCTGCAAAGGCGGCACAACCCCAG
TGCCACGTTGTGAGTTGGATAGTTGTGGAAAGAGTCAAATGGCTCTCTTC
AAGCGTATTCAACAAGGGGCTGAAGGATGCCCAGAAGGTACCCCATTGTA
TGGGATCTGATCTGGGGCCTCGGTGCAGATGCTTTACATGTGTTTAGTCG
AGGTTAAAAAAACGTCTAGGCCCCCCGAACCACGGGGACGTGGTTTTCCT
TTGAAAAACACGATGATAATATGGCCACAACCATGGGATGGTCCTGCATC
ATCCTGTTTCTGGTGGCCACAGCCACAGGCGCTCACTCCGAGGTGCAATT
GCTGGAATCCGGCGGAGGACTGGTGCAGCCTGGCGGCTCCCTGAGACTGT
CTTGCGCCGCCTCCGGCTTCACCTTCTCCCACTACATCATGATGTGGGTG
CGACAGGCTCCTGGCAAGGGGCTGGAATGGGTGTCCGGCATCTACTCCTC
CGGCGGCATCACCGTGTACGCCGACTCCGTGAAGGGCCGGTTCACCATCT
CTCGGGACAACTCCAAGAACACCCTGTACCTGCAGATGAACTCCCTGCGG
GCCGAGGACACCGCCGTGTACTACTGCGCCTACCGGCGGATCGGCGTGCC
CAGACGGGACGAGTTCGACATCTGGGGGCAGGGCACCATGGTGACAGTGT
CCTCCGCCTCCACCAAGGGCCCCTCTGTGTTCCCGCTAGCACCCTCCAGC
AAGTCCACCTCCGGCGGCACCGCTGCTCTGGGCTGCCTCGTCAAGGACTA
CTTCCCCGAGCCCGTGACCGTGTCCTGGAACTCTGGCGCCCTGACCAGCG
GAGTGCATACCTTCCCTGCCGTGCTCCAGTCCTCCGGCCTGTACAGCCTG
TCCTCTGTCGTGACCGTGCCCTCCAGCTCCCTGGGCACCCAGACCTACAT
CTGCAACGTGAACCACAAGCCCTCCAACACCAAAGTGGACAAGCGGGTGG
AACCCAAGTCCTGCGACACCCACACCTGTCCCCCTTGCCCTGCCCCTGAA
CTGCTGGGCGGACCCAGCGTGTTCCTGTTCCCCCCAAAGCCCAAGGACAC
CCTGATGATCTCCCGGACCCCCGAAGTGACCTGCGTGGTGGTGGACGTGT
CCCACGAGGACCCTGAAGTGAAGTTTAATTGGTACGTGGACGGCGTGGAA
GTGCATAACGCCAAGACCAAGCCCAGAGAGGAACAGTACAACTCCACCTA
CCGGGTGGTGTCCGTGCTGACCGTGCTGCACCAGGACTGGCTGAACGGCA
AAGAGTACAAGTGCAAGGTGTCCAACAAGGCCCTGCCTGCCCCCATCGAA
AAGACCATCAGCAAGGCCAAGGGCCAGCCTCGCGAGCCCCAGGTGTACAC
CCTGCCCCCTAGCCGGGAAGAGATGACCAAGAACCAGGTGTCCCTGACCT
GTCTGGTCAAGGGCTTCTACCCCTCCGATATCGCCGTGGAATGGGAGTCC
AACGGCCAGCCCGAGAACAACTACAAGACCACCCCCCCTGTGCTGGACAG
CGACGGCTCATTCTTCCTGTACTCCAAGCTGACCGTGGACAAGTCCCGGT
GGCAGCAGGGCAACGTGTTCTCCTGCTCCGTGATGCACGAGGCCCTGCAC
AACCACTACACCCAGAAGTCCCTGTCCCTGTCTCCCGGCAAGTCTGGCGG
AGGATCCGACATCCAGATGACCCAGAGCCCCCTGAGCCTGAGCGTGGCAC
CTGGCGAGCCTGCCAGCATCAGCTGCAGAAGCAGCCAGAGCCTGCTGCAC
CGGAACGGCCACAACTACCTGGACTGGTATCTGCAGAAGCCCGGCCAGTC
CCCCCAGCTGCTGATCTACCTGGGCAGCAACAGAGCCAGCGGCGTGCCCG
AGAGATTCAGCGGCAGCGGCTCCGGCACCGACTTCACCCTGCGGATCAGC
CGGGTCGAAGCCGAGGACGTGGGCGTGTACTACTGCATGCAGGCTCTGCA
GGCCAGAACCTTCGGCCAGGGCACCAAGGTGGAAATCAAGCGGACAGGCG
GCGGAGGCTCTGGCGGAGGTGGAAGCGGAGGCGGAGGAAGTGGCGGAGGC
GGCTCTGAGGTGCAGCTGCTGGAATCTGGCGGCGGACTGGTGCAGCCTGG
CGGCAGCCTGAGACTGTCTTGCGCCGCCAGCGGCTTCACCTTCAGCGGCT
ACATCATGGCCTGGGTCCGACAGGCCCCTGGCAAGGGCCTGGAATGGGTG
TCCTACATCTACCCCAGCGGCGGCATCACCGTGTACGCCGACAGCGTGAA
GGGCCGGTTCACCATCAGCCGGGACAACAGCAAGAACACCCTGTACCTGC
AGATGAACAGCCTGCGGGCCGAGGACACCGCCGTGTACTATTGCACCCGG
CAGCGGTACAGAGGCCCCAAGTACTACTACTACATGGACGTGTGGGGCAA
GGGCACCACCGTGACCGTGTCCAGCTGAATCTAGA
X0121-A03

(SEQ ID NO: 28)

ATGGGATGGTCCTGCATCATCCTGTTTCTGGTGGCTACAGCCACAGGCGT
GCACTCCGACATCCAGATGACCCAGTCCCCCTCCACCCTGTCCGCCTCTG
TGGGCGACAGAGTGACCATCACCTGTCGGGCCTCCCAGTCCATCTCCAGC
TGGCTGGCCTGGTATCAGCAGAAGCCCGGCAAGGCCCCCAAGCTGCTGAT
CTACAAGGCCAGCACCCTGGAATCCGGCGTGCCCTCCAGATTCTCCGGCT
CTGGCTCCGGCACCGAGTTCACCCTGACCATCAGCTCCCTGCAGCCCGAC
GACTTCGCCACCTACTACTGCCAGCAGTACAACACCTACTGGACCTTCGG
CCAGGGCACCAAGGTGGAAATCAAGCGGACCGTGGCCGCTCCCTCCGTGT
TCATCTTCCCACCCTCCGACGAGCAGCTGAAGTCCGGCACCGCCTCCGTG
GTCTGCCTGCTGAACAACTTCTACCCCCGCGAGGCCAAGGTGCAGTGGAA
GGTGGACAACGCCCTGCAGTCCGGCAACTCCCAGGAATCCGTGACCGAGC
AGGACTCCAAGGACAGCACCTACTCCCTGTCCTCTACCCTGACCCTGTCC
AAGGCCGACTACGAGAAGCACAAGGTGTACGCCTGCGAAGTGACCCACCA
GGGCCTGTCCAGCCCCGTGACCAAGTCCTTCAACCGGGGCGAGTGCTGAT
GAGGCGCGCCTTCGCGTCGAGCATGCATCTAGGGCGGCCAATTCCGCCCC
TCTCCCCCCCCCCCCCTAACGTTACTGGCCGAAGCCGCTTGGAATAAGGC
CGGTGTGCGTTTGTCTATATGTTATTTTCCACCATATTGCCGTCTTTTGG
CAATGTGAGGGCCCGGAAACCTGGCCCTGTCTTCTTGACGAGCATTCCTA
GGGGTCTTTCCCCTCTCGCCAAAGGAATGCAAGGTCTGTTGAATGTCGTG
AAGGAAGCAGTTCCTCTGGAAGCTTCTTGAAGACAAACAACGTCTGTAGC
GACCCTTTGCAGGCAGCGGAACCCCCCACCTGGCGACAGGTGCCTCTGCG
GCCAAAAGCCACGTGTATAAGATACACCTGCAAAGGCGGCACAACCCCAG
TGCCACGTTGTGAGTTGGATAGTTGTGGAAAGAGTCAAATGGCTCTCTTC
AAGCGTATTCAACAAGGGGCTGAAGGATGCCCAGAAGGTACCCCATTGTA
TGGGATCTGATCTGGGGCCTCGGTGCAGATGCTTTACATGTGTTTAGTCG
AGGTTAAAAAAACGTCTAGGCCCCCCGAACCACGGGGACGTGGTTTTCCT
TTGAAAAACACGATGATAATATGGCCACAACCATGGGATGGTCCTGCATC
ATCCTGTTTCTGGTGGCCACAGCCACAGGCGCTCACTCCGAGGTGCAATT
GCTGGAATCCGGCGGAGGACTGGTGCAGCCTGGCGGCTCCCTGAGACTGT
CTTGCGCCGCCTCCGGCTTCACCTTCTCCCACTACATCATGATGTGGGTG
CGACAGGCTCCTGGCAAGGGGCTGGAATGGGTGTCCGGCATCTACTCCTC
CGGCGGCATCACCGTGTACGCCGACTCCGTGAAGGGCCGGTTCACCATCT
CTCGGGACAACTCCAAGAACACCCTGTACCTGCAGATGAACTCCCTGCGG
GCCGAGGACACCGCCGTGTACTACTGCGCCTACCGGCGGATCGGCGTGCC
CAGACGGGACGAGTTCGACATCTGGGGGCAGGGCACCATGGTGACAGTGT
CCTCCGCCTCCACCAAGGGCCCCTCTGTGTTCCCGCTAGCACCCTCCAGC
AAGTCCACCTCCGGCGGCACCGCTGCTCTGGGCTGCCTCGTCAAGGACTA
CTTCCCCGAGCCCGTGACCGTGTCCTGGAACTCTGGCGCCCTGACCAGCG
GAGTGCATACCTTCCCTGCCGTGCTCCAGTCCTCCGGCCTGTACAGCCTG
TCCTCTGTCGTGACCGTGCCCTCCAGCTCCCTGGGCACCCAGACCTACAT
CTGCAACGTGAACCACAAGCCCTCCAACACCAAAGTGGACAAGCGGGTGG
AACCCAAGTCCTGCGACACCCACACCTGTCCCCCTTGCCCTGCCCCTGAA
CTGCTGGGCGGACCCAGCGTGTTCCTGTTCCCCCCAAAGCCCAAGGACAC
CCTGATGATCTCCCGGACCCCCGAAGTGACCTGCGTGGTGGTGGACGTGT
CCCACGAGGACCCTGAAGTGAAGTTTAATTGGTACGTGGACGGCGTGGAA
GTGCATAACGCCAAGACCAAGCCCAGAGAGGAACAGTACAACTCCACCTA
CCGGGTGGTGTCCGTGCTGACCGTGCTGCACCAGGACTGGCTGAACGGCA
AAGAGTACAAGTGCAAGGTGTCCAACAAGGCCCTGCCTGCCCCCATCGAA
AAGACCATCAGCAAGGCCAAGGGCCAGCCTCGCGAGCCCCAGGTGTACAC
CCTGCCCCCTAGCCGGGAAGAGATGACCAAGAACCAGGTGTCCCTGACCT
GTCTGGTCAAGGGCTTCTACCCCTCCGATATCGCCGTGGAATGGGAGTCC
AACGGCCAGCCCGAGAACAACTACAAGACCACCCCCCCTGTGCTGGACAG
CGACGGCTCATTCTTCCTGTACTCCAAGCTGACCGTGGACAAGTCCCGGT
GGCAGCAGGGCAACGTGTTCTCCTGCTCCGTGATGCACGAGGCCCTGCAC
AACCACTACACCCAGAAGTCCCTGTCCCTGTCTCCCGGCAAGTCTGGCGG
AGGATCCGAAGTGCAGCTGCTGGAAAGCGGCGGAGGACTGGTGCAGCCTG
GAGGCAGCCTGAGACTGTCTTGCGCCGCCAGCGGCTTCACCTTCAGCGGC
TACATCATGGCCTGGGTCCGACAGGCTCCAGGCAAGGGCCTGGAATGGGT
GTCCTACATCTACCCCAGCGGCGGCATCACCGTGTACGCCGACAGCGTGA
AGGGCCGGTTCACCATCAGCCGGGACAACAGCAAGAACACCCTGTACCTG
CAGATGAACAGCCTGCGGGCCGAGGACACCGCCGTGTACTACTGCACCCG
GCAGCGGTACAGAGGCCCCAAGTACTACTACTACATGGACGTGTGGGGCA
AGGGCACCACCGTGACCGTGTCTAGCGGAGGCGGAGGATCTGGCGGAGGT
GGAAGTGGTGGTGGCGGAAGTGGCGGCGGAGGCAGCGACATCCAGATGAC
CCAGAGCCCCCTGAGCCTGCCCGTGACACCTGGCGAGCCTGCCAGCATCA
GCTGCAGAAGCAGCCAGAGCCTGCTGCACAGCAACGGCTACAACTACCTG
GACTGGTATCTGCAGAAGCCCGGCCAGTCCCCCCAGCTGCTGATCTACCT
GGGCAGCAACAGAGCCAGCGGCGTGCCCGACAGATTCAGCGGCAGCGGCT
CCGGCACCGACTTCACCCTGAAGATCAGCCGGGTGGAAGCCGAGGACGTG
GGCGTGTACTATTGCATGCAGGCCCTGCAGACCCGGACCTTCGGCCAGGG
CACCAAGGTGGAAATCAAGAGATGAATCTAGA
X0121-C01

(SEQ ID NO: 29)

ATGGGATGGTCCTGCATCATCCTGTTTCTGGTGGCTACAGCCACAGGCGT
GCACTCCGACATCCAGATGACCCAGTCCCCCTCCACCCTGTCCGCCTCTG
TGGGCGACAGAGTGACCATCACCTGTCGGGCCTCCCAGTCCATCTCCAGC
TGGCTGGCCTGGTATCAGCAGAAGCCCGGCAAGGCCCCCAAGCTGCTGAT
CTACAAGGCCAGCACCCTGGAATCCGGCGTGCCCTCCAGATTCTCCGGCT
CTGGCTCCGGCACCGAGTTCACCCTGACCATCAGCTCCCTGCAGCCCGAC
GACTTCGCCACCTACTACTGCCAGCAGTACAACACCTACTGGACCTTCGG
CCAGGGCACCAAGGTGGAAATCAAGCGGACCGTGGCCGCTCCCTCCGTGT
TCATCTTCCCACCCTCCGACGAGCAGCTGAAGTCCGGCACCGCCTCCGTG
GTCTGCCTGCTGAACAACTTCTACCCCCGCGAGGCCAAGGTGCAGTGGAA
GGTGGACAACGCCCTGCAGTCCGGCAACTCCCAGGAATCCGTGACCGAGC
AGGACTCCAAGGACAGCACCTACTCCCTGTCCTCTACCCTGACCCTGTCC
AAGGCCGACTACGAGAAGCACAAGGTGTACGCCTGCGAAGTGACCCACCA
GGGCCTGTCCAGCCCCGTGACCAAGTCCTTCAACCGGGGCGAGTGCTGAT
GAGGCGCGCCTTCGCGTCGAGCATGCATCTAGGGCGGCCAATTCCGCCCC
TCTCCCCCCCCCCCCCTAACGTTACTGGCCGAAGCCGCTTGGAATAAGGC
CGGTGTGCGTTTGTCTATATGTTATTTTCCACCATATTGCCGTCTTTTGG
CAATGTGAGGGCCCGGAAACCTGGCCCTGTCTTCTTGACGAGCATTCCTA
GGGGTCTTTCCCCTCTCGCCAAAGGAATGCAAGGTCTGTTGAATGTCGTG
AAGGAAGCAGTTCCTCTGGAAGCTTCTTGAAGACAAACAACGTCTGTAGC
GACCCTTTGCAGGCAGCGGAACCCCCCACCTGGCGACAGGTGCCTCTGCG
GCCAAAAGCCACGTGTATAAGATACACCTGCAAAGGCGGCACAACCCCAG
TGCCACGTTGTGAGTTGGATAGTTGTGGAAAGAGTCAAATGGCTCTCTTC
AAGCGTATTCAACAAGGGGCTGAAGGATGCCCAGAAGGTACCCCATTGTA
TGGGATCTGATCTGGGGCCTCGGTGCAGATGCTTTACATGTGTTTAGTCG
AGGTTAAAAAAACGTCTAGGCCCCCCGAACCACGGGGACGTGGTTTTCCT
TTGAAAAACACGATGATAATATGGCCACAACCATGGGATGGTCCTGCATC
ATCCTGTTTCTGGTGGCCACAGCCACAGGCGCTCACTCCGAGGTGCAATT
GCTGGAATCCGGCGGAGGACTGGTGCAGCCTGGCGGCTCCCTGAGACTGT
CTTGCGCCGCCTCCGGCTTCACCTTCTCCCACTACATCATGATGTGGGTG
CGACAGGCTCCTGGCAAGGGGCTGGAATGGGTGTCCGGCATCTACTCCTC
CGGCGGCATCACCGTGTACGCCGACTCCGTGAAGGGCCGGTTCACCATCT
CTCGGGACAACTCCAAGAACACCCTGTACCTGCAGATGAACTCCCTGCGG
GCCGAGGACACCGCCGTGTACTACTGCGCCTACCGGCGGATCGGCGTGCC
CAGACGGGACGAGTTCGACATCTGGGGGCAGGGCACCATGGTGACAGTGT
CCTCCGCCTCCACCAAGGGCCCCTCTGTGTTCCCGCTAGCACCCTCCAGC
AAGTCCACCTCCGGCGGCACCGCTGCTCTGGGCTGCCTCGTCAAGGACTA
CTTCCCCGAGCCCGTGACCGTGTCCTGGAACTCTGGCGCCCTGACCAGCG
GAGTGCATACCTTCCCTGCCGTGCTCCAGTCCTCCGGCCTGTACAGCCTG
TCCTCTGTCGTGACCGTGCCCTCCAGCTCCCTGGGCACCCAGACCTACAT
CTGCAACGTGAACCACAAGCCCTCCAACACCAAAGTGGACAAGCGGGTGG
AACCCAAGTCCTGCGACACCCACACCTGTCCCCCTTGCCCTGCCCCTGAA
CTGCTGGGCGGACCCAGCGTGTTCCTGTTCCCCCCAAAGCCCAAGGACAC
CCTGATGATCTCCCGGACCCCCGAAGTGACCTGCGTGGTGGTGGACGTGT
CCCACGAGGACCCTGAAGTGAAGTTTAATTGGTACGTGGACGGCGTGGAA
GTGCATAACGCCAAGACCAAGCCCAGAGAGGAACAGTACAACTCCACCTA
CCGGGTGGTGTCCGTGCTGACCGTGCTGCACCAGGACTGGCTGAACGGCA
AAGAGTACAAGTGCAAGGTGTCCAACAAGGCCCTGCCTGCCCCCATCGAA
AAGACCATCAGCAAGGCCAAGGGCCAGCCTCGCGAGCCCCAGGTGTACAC
CCTGCCCCCTAGCCGGGAAGAGATGACCAAGAACCAGGTGTCCCTGACCT
GTCTGGTCAAGGGCTTCTACCCCTCCGATATCGCCGTGGAATGGGAGTCC
AACGGCCAGCCCGAGAACAACTACAAGACCACCCCCCCTGTGCTGGACAG
CGACGGCTCATTCTTCCTGTACTCCAAGCTGACCGTGGACAAGTCCCGGT
GGCAGCAGGGCAACGTGTTCTCCTGCTCCGTGATGCACGAGGCCCTGCAC
AACCACTACACCCAGAAGTCCCTGTCCCTGTCTCCCGGCAAGTCTGGCGG
AGGATCCGACATCCAGATGACCCAGAGCCCCCTGAGCCTGCCCGTGACAC
CTGGCGAGCCTGCCAGCATCAGCTGCAGAAGCAGCCAGAGCCTGCTGCAC
AGCAACGGCTACAACTACCTGGACTGGTATCTGCAGAAGCCCGGCCAGTC
CCCCCAGCTGCTGATCTACCTGGGCAGCAACAGAGCCAGCGGCGTGCCCG
ACAGATTCAGCGGCAGCGGCTCCGGCACCGACTTCACCCTGAAGATCAGC
CGGGTCGAAGCCGAGGACGTGGGCGTGTACTACTGCATGCAGGCCCTGCA
GACCCGGACCTTCGGCCAGGGCACCAAGGTGGAAATCAAGCGGACAGGCG
GCGGAGGCTCTGGCGGAGGTGGAAGCGGAGGCGGAGGAAGTGGCGGAGGC
GGCTCTGAGGTGCAGCTGCTGGAATCTGGCGGCGGACTGGTGCAGCCTGG
CGGCAGCCTGAGACTGTCTTGCGCCGCCAGCGGCTTCACCTTCAGCGGCT
ACATCATGGCCTGGGTCCGACAGGCCCCTGGCAAGGGCCTGGAATGGGTG
TCCTACATCTACCCCAGCGGCGGCATCACCGTGTACGCCGACAGCGTGAA
GGGCCGGTTCACCATCAGCCGGGACAACAGCAAGAACACCCTGTACCTGC
AGATGAACAGCCTGCGGGCCGAGGACACCGCCGTGTACTATTGCACCCGG
CAGCGGTACAGAGGCCCCAAGTACTACTACTACATGGACGTGTGGGGCAA
GGGCACCACCGTGACCGTGTCCAGCTGAATCTAGA
X0121-E01

(SEQ ID NO: 30)

ATGGGATGGTCCTGCATCATCCTGTTTCTGGTGGCTACAGCCACAGGCGT
GCACTCCGACATCCAGATGACCCAGTCCCCCTCCACCCTGTCCGCCTCTG
TGGGCGACAGAGTGACCATCACCTGTCGGGCCTCCCAGTCCATCTCCAGC
TGGCTGGCCTGGTATCAGCAGAAGCCCGGCAAGGCCCCCAAGCTGCTGAT
CTACAAGGCCAGCACCCTGGAATCCGGCGTGCCCTCCAGATTCTCCGGCT
CTGGCTCCGGCACCGAGTTCACCCTGACCATCAGCTCCCTGCAGCCCGAC
GACTTCGCCACCTACTACTGCCAGCAGTACAACACCTACTGGACCTTCGG
CCAGGGCACCAAGGTGGAAATCAAGCGGACCGTGGCCGCTCCCTCCGTGT
TCATCTTCCCACCCTCCGACGAGCAGCTGAAGTCCGGCACCGCCTCCGTG
GTCTGCCTGCTGAACAACTTCTACCCCCGCGAGGCCAAGGTGCAGTGGAA
GGTGGACAACGCCCTGCAGTCCGGCAACTCCCAGGAATCCGTGACCGAGC
AGGACTCCAAGGACAGCACCTACTCCCTGTCCTCTACCCTGACCCTGTCC
AAGGCCGACTACGAGAAGCACAAGGTGTACGCCTGCGAAGTGACCCACCA
GGGCCTGTCCAGCCCCGTGACCAAGTCCTTCAACCGGGGCGAGTGCTGAT
GAGGCGCGCCTTCGCGTCGAGCATGCATCTAGGGCGGCCAATTCCGCCCC
TCTCCCCCCCCCCCCCTAACGTTACTGGCCGAAGCCGCTTGGAATAAGGC
CGGTGTGCGTTTGTCTATATGTTATTTTCCACCATATTGCCGTCTTTTGG
CAATGTGAGGGCCCGGAAACCTGGCCCTGTCTTCTTGACGAGCATTCCTA
GGGGTCTTTCCCCTCTCGCCAAAGGAATGCAAGGTCTGTTGAATGTCGTG
AAGGAAGCAGTTCCTCTGGAAGCTTCTTGAAGACAAACAACGTCTGTAGC
GACCCTTTGCAGGCAGCGGAACCCCCCACCTGGCGACAGGTGCCTCTGCG
GCCAAAAGCCACGTGTATAAGATACACCTGCAAAGGCGGCACAACCCCAG
TGCCACGTTGTGAGTTGGATAGTTGTGGAAAGAGTCAAATGGCTCTCTTC
AAGCGTATTCAACAAGGGGCTGAAGGATGCCCAGAAGGTACCCCATTGTA
TGGGATCTGATCTGGGGCCTCGGTGCAGATGCTTTACATGTGTTTAGTCG
AGGTTAAAAAAACGTCTAGGCCCCCCGAACCACGGGGACGTGGTTTTCCT
TTGAAAAACACGATGATAATATGGCCACAACCATGGGATGGTCCTGCATC
ATCCTGTTTCTGGTGGCCACAGCCACAGGCGCTCACTCCGAGGTGCAATT
GCTGGAATCCGGCGGAGGACTGGTGCAGCCTGGCGGCTCCCTGAGACTGT
CTTGCGCCGCCTCCGGCTTCACCTTCTCCCACTACATCATGATGTGGGTG
CGACAGGCTCCTGGCAAGGGGCTGGAATGGGTGTCCGGCATCTACTCCTC
CGGCGGCATCACCGTGTACGCCGACTCCGTGAAGGGCCGGTTCACCATCT
CTCGGGACAACTCCAAGAACACCCTGTACCTGCAGATGAACTCCCTGCGG
GCCGAGGACACCGCCGTGTACTACTGCGCCTACCGGCGGATCGGCGTGCC
CAGACGGGACGAGTTCGACATCTGGGGGCAGGGCACCATGGTGACAGTGT
CCTCCGCCTCCACCAAGGGCCCCTCTGTGTTCCCGCTAGCACCCTCCAGC
AAGTCCACCTCCGGCGGCACCGCTGCTCTGGGCTGCCTCGTCAAGGACTA
CTTCCCCGAGCCCGTGACCGTGTCCTGGAACTCTGGCGCCCTGACCAGCG
GAGTGCATACCTTCCCTGCCGTGCTCCAGTCCTCCGGCCTGTACAGCCTG
TCCTCTGTCGTGACCGTGCCCTCCAGCTCCCTGGGCACCCAGACCTACAT
CTGCAACGTGAACCACAAGCCCTCCAACACCAAAGTGGACAAGCGGGTGG
AACCCAAGTCCTGCGACACCCACACCTGTCCCCCTTGCCCTGCCCCTGAA
CTGCTGGGCGGACCCAGCGTGTTCCTGTTCCCCCCAAAGCCCAAGGACAC
CCTGATGATCTCCCGGACCCCCGAAGTGACCTGCGTGGTGGTGGACGTGT
CCCACGAGGACCCTGAAGTGAAGTTTAATTGGTACGTGGACGGCGTGGAA
GTGCATAACGCCAAGACCAAGCCCAGAGAGGAACAGTACAACTCCACCTA
CCGGGTGGTGTCCGTGCTGACCGTGCTGCACCAGGACTGGCTGAACGGCA
AAGAGTACAAGTGCAAGGTGTCCAACAAGGCCCTGCCTGCCCCCATCGAA
AAGACCATCAGCAAGGCCAAGGGCCAGCCTCGCGAGCCCCAGGTGTACAC
CCTGCCCCCTAGCCGGGAAGAGATGACCAAGAACCAGGTGTCCCTGACCT
GTCTGGTCAAGGGCTTCTACCCCTCCGATATCGCCGTGGAATGGGAGTCC
AACGGCCAGCCCGAGAACAACTACAAGACCACCCCCCCTGTGCTGGACAG
CGACGGCTCATTCTTCCTGTACTCCAAGCTGACCGTGGACAAGTCCCGGT
GGCAGCAGGGCAACGTGTTCTCCTGCTCCGTGATGCACGAGGCCCTGCAC
AACCACTACACCCAGAAGTCCCTGTCCCTGTCTCCCGGCAAGTCTGGCGG
AGGATCCGAAGTGCAGCTGCTGGAAAGCGGCGGAGGACTGGTGCAGCCTG
GAGGCAGCCTGAGACTGTCTTGCGCCGCCAGCGGCTTCACCTTCAGCGGC
TACATCATGGCCTGGGTCCGACAGGCTCCAGGCAAGGGCCTGGAATGGGT
GTCCTACATCTACCCCAGCGGCGGCATCACCGTGTACGCCGACAGCGTGA
AGGGCCGGTTCACCATCAGCCGGGACAACAGCAAGAACACCCTGTACCTG
CAGATGAACAGCCTGCGGGCCGAGGACACCGCCGTGTACTACTGCACCCG
GCAGCGGTACAGAGGCCCCAAGTACTACTACTACATGGACGTGTGGGGCA
AGGGCACCACCGTGACCGTGTCTAGCGGAGGCGGAGGATCTGGCGGAGGT
GGAAGTGGTGGTGGCGGAAGTGGCGGCGGAGGCAGCGACATCCAGATGAC
CCAGAGCCCCCTGAGCCTGCCCGTGACACCTGGCGAGCCTGCCAGCATCA
GCTGCAGAAGCAGCCAGAGCCTGCTGCACAGCAACGGCTACAACTACCTG
GACTGGTATCTGCAGAAGCCCGGCCAGTCCCCCCAGATCATGATCTACCT
GGGCAGCAACAGAGCCAGCGGCGTGCCCGACAGATTCAGCGGCAGCGGCT
CCGGCACCGACTTCACCCTGAAGATCAGCCGGGTGGAAGCCGAGGACGTG
GGCGTGTACTATTGCATGCAGGCCCTGCAGACCCCCAGAACCTTCGGCCA
GGGCACCAAGGTGGAAATCAAGAGATGAATCTAGA
X0121-G01

(SEQ ID NO: 31)

ATGGGATGGTCCTGCATCATCCTGTTTCTGGTGGCTACAGCCACAGGCGT
GCACTCCGACATCCAGATGACCCAGTCCCCCTCCACCCTGTCCGCCTCTG
TGGGCGACAGAGTGACCATCACCTGTCGGGCCTCCCAGTCCATCTCCAGC
TGGCTGGCCTGGTATCAGCAGAAGCCCGGCAAGGCCCCCAAGCTGCTGAT
CTACAAGGCCAGCACCCTGGAATCCGGCGTGCCCTCCAGATTCTCCGGCT
CTGGCTCCGGCACCGAGTTCACCCTGACCATCAGCTCCCTGCAGCCCGAC
GACTTCGCCACCTACTACTGCCAGCAGTACAACACCTACTGGACCTTCGG
CCAGGGCACCAAGGTGGAAATCAAGCGGACCGTGGCCGCTCCCTCCGTGT
TCATCTTCCCACCCTCCGACGAGCAGCTGAAGTCCGGCACCGCCTCCGTG
GTCTGCCTGCTGAACAACTTCTACCCCCGCGAGGCCAAGGTGCAGTGGAA
GGTGGACAACGCCCTGCAGTCCGGCAACTCCCAGGAATCCGTGACCGAGC
AGGACTCCAAGGACAGCACCTACTCCCTGTCCTCTACCCTGACCCTGTCC
AAGGCCGACTACGAGAAGCACAAGGTGTACGCCTGCGAAGTGACCCACCA
GGGCCTGTCCAGCCCCGTGACCAAGTCCTTCAACCGGGGCGAGTGCTGAT
GAGGCGCGCCTTCGCGTCGAGCATGCATCTAGGGCGGCCAATTCCGCCCC
TCTCCCCCCCCCCCCCTAACGTTACTGGCCGAAGCCGCTTGGAATAAGGC
CGGTGTGCGTTTGTCTATATGTTATTTTCCACCATATTGCCGTCTTTTGG
CAATGTGAGGGCCCGGAAACCTGGCCCTGTCTTCTTGACGAGCATTCCTA
GGGGTCTTTCCCCTCTCGCCAAAGGAATGCAAGGTCTGTTGAATGTCGTG
AAGGAAGCAGTTCCTCTGGAAGCTTCTTGAAGACAAACAACGTCTGTAGC
GACCCTTTGCAGGCAGCGGAACCCCCCACCTGGCGACAGGTGCCTCTGCG
GCCAAAAGCCACGTGTATAAGATACACCTGCAAAGGCGGCACAACCCCAG
TGCCACGTTGTGAGTTGGATAGTTGTGGAAAGAGTCAAATGGCTCTCTTC
AAGCGTATTCAACAAGGGGCTGAAGGATGCCCAGAAGGTACCCCATTGTA
TGGGATCTGATCTGGGGCCTCGGTGCAGATGCTTTACATGTGTTTAGTCG
AGGTTAAAAAAACGTCTAGGCCCCCCGAACCACGGGGACGTGGTTTTCCT
TTGAAAAACACGATGATAATATGGCCACAACCATGGGATGGTCCTGCATC
ATCCTGTTTCTGGTGGCCACAGCCACAGGCGCTCACTCCGAGGTGCAATT
GCTGGAATCCGGCGGAGGACTGGTGCAGCCTGGCGGCTCCCTGAGACTGT
CTTGCGCCGCCTCCGGCTTCACCTTCTCCCACTACATCATGATGTGGGTG
CGACAGGCTCCTGGCAAGGGGCTGGAATGGGTGTCCGGCATCTACTCCTC
CGGCGGCATCACCGTGTACGCCGACTCCGTGAAGGGCCGGTTCACCATCT
CTCGGGACAACTCCAAGAACACCCTGTACCTGCAGATGAACTCCCTGCGG
GCCGAGGACACCGCCGTGTACTACTGCGCCTACCGGCGGATCGGCGTGCC
CAGACGGGACGAGTTCGACATCTGGGGGCAGGGCACCATGGTGACAGTGT
CCTCCGCCTCCACCAAGGGCCCCTCTGTGTTCCCGCTAGCACCCTCCAGC
AAGTCCACCTCCGGCGGCACCGCTGCTCTGGGCTGCCTCGTCAAGGACTA
CTTCCCCGAGCCCGTGACCGTGTCCTGGAACTCTGGCGCCCTGACCAGCG
GAGTGCATACCTTCCCTGCCGTGCTCCAGTCCTCCGGCCTGTACAGCCTG
TCCTCTGTCGTGACCGTGCCCTCCAGCTCCCTGGGCACCCAGACCTACAT
CTGCAACGTGAACCACAAGCCCTCCAACACCAAAGTGGACAAGCGGGTGG
AACCCAAGTCCTGCGACACCCACACCTGTCCCCCTTGCCCTGCCCCTGAA
CTGCTGGGCGGACCCAGCGTGTTCCTGTTCCCCCCAAAGCCCAAGGACAC
CCTGATGATCTCCCGGACCCCCGAAGTGACCTGCGTGGTGGTGGACGTGT
CCCACGAGGACCCTGAAGTGAAGTTTAATTGGTACGTGGACGGCGTGGAA
GTGCATAACGCCAAGACCAAGCCCAGAGAGGAACAGTACAACTCCACCTA
CCGGGTGGTGTCCGTGCTGACCGTGCTGCACCAGGACTGGCTGAACGGCA
AAGAGTACAAGTGCAAGGTGTCCAACAAGGCCCTGCCTGCCCCCATCGAA
AAGACCATCAGCAAGGCCAAGGGCCAGCCTCGCGAGCCCCAGGTGTACAC
CCTGCCCCCTAGCCGGGAAGAGATGACCAAGAACCAGGTGTCCCTGACCT
GTCTGGTCAAGGGCTTCTACCCCTCCGATATCGCCGTGGAATGGGAGTCC
AACGGCCAGCCCGAGAACAACTACAAGACCACCCCCCCTGTGCTGGACAG
CGACGGCTCATTCTTCCTGTACTCCAAGCTGACCGTGGACAAGTCCCGGT
GGCAGCAGGGCAACGTGTTCTCCTGCTCCGTGATGCACGAGGCCCTGCAC
AACCACTACACCCAGAAGTCCCTGTCCCTGTCTCCCGGCAAGTCTGGCGG
AGGATCCGACATCCAGATGACCCAGAGCCCCCTGAGCCTGCCCGTGACAC
CTGGCGAGCCTGCCAGCATCAGCTGCAGAAGCAGCCAGAGCCTGCTGCAC
AGCAACGGCTACAACTACCTGGACTGGTATCTGCAGAAGCCCGGCCAGTC
CCCCCAGATCATGATCTACCTGGGCAGCAACAGAGCCAGCGGCGTGCCCG
ACAGATTCAGCGGCAGCGGCTCCGGCACCGACTTCACCCTGAAGATCAGC
CGGGTCGAAGCCGAGGACGTGGGCGTGTACTACTGCATGCAGGCCCTGCA
GACCCCCAGAACCTTCGGCCAGGGCACCAAGGTGGAAATCAAGCGGACAG
GCGGCGGAGGCTCTGGCGGAGGTGGAAGCGGAGGCGGAGGAAGTGGCGGA
GGCGGCTCTGAGGTGCAGCTGCTGGAATCTGGCGGCGGACTGGTGCAGCC
TGGCGGCAGCCTGAGACTGTCTTGCGCCGCCAGCGGCTTCACCTTCAGCG
GCTACATCATGGCCTGGGTCCGACAGGCCCCTGGCAAGGGCCTGGAATGG
GTGTCCTACATCTACCCCAGCGGCGGCATCACCGTGTACGCCGACAGCGT
GAAGGGCCGGTTCACCATCAGCCGGGACAACAGCAAGAACACCCTGTACC
TGCAGATGAACAGCCTGCGGGCCGAGGACACCGCCGTGTACTATTGCACC
CGGCAGCGGTACAGAGGCCCCAAGTACTACTACTACATGGACGTGTGGGG
CAAGGGCACCACCGTGACCGTGTCCAGCTGAATCTAGA
X0122-A01

(SEQ ID NO: 32)

ATGGGATGGTCCTGCATCATCCTGTTTCTGGTGGCTACAGCCACAGGCGT
GCACTCCGACATCCAGATGACCCAGTCCCCCTCCACCCTGTCCGCCTCTG
TGGGCGACAGAGTGACCATCACCTGTCGGGCCTCCCAGTCCATCTCCAGC
TGGCTGGCCTGGTATCAGCAGAAGCCCGGCAAGGCCCCCAAGCTGCTGAT
CTACAAGGCCAGCACCCTGGAATCCGGCGTGCCCTCCAGATTCTCCGGCT
CTGGCTCCGGCACCGAGTTCACCCTGACCATCAGCTCCCTGCAGCCCGAC
GACTTCGCCACCTACTACTGCCAGCAGTACAACACCTACTGGACCTTCGG
CCAGGGCACCAAGGTGGAAATCAAGCGGACCGTGGCCGCTCCCTCCGTGT
TCATCTTCCCACCCTCCGACGAGCAGCTGAAGTCCGGCACCGCCTCCGTG
GTCTGCCTGCTGAACAACTTCTACCCCCGCGAGGCCAAGGTGCAGTGGAA
GGTGGACAACGCCCTGCAGTCCGGCAACTCCCAGGAATCCGTGACCGAGC
AGGACTCCAAGGACAGCACCTACTCCCTGTCCTCTACCCTGACCCTGTCC
AAGGCCGACTACGAGAAGCACAAGGTGTACGCCTGCGAAGTGACCCACCA
GGGCCTGTCCAGCCCCGTGACCAAGTCCTTCAACCGGGGCGAGTGCTGAT
GAGGCGCGCCTTCGCGTCGAGCATGCATCTAGGGCGGCCAATTCCGCCCC
TCTCCCCCCCCCCCCCTAACGTTACTGGCCGAAGCCGCTTGGAATAAGGC
CGGTGTGCGTTTGTCTATATGTTATTTTCCACCATATTGCCGTCTTTTGG
CAATGTGAGGGCCCGGAAACCTGGCCCTGTCTTCTTGACGAGCATTCCTA
GGGGTCTTTCCCCTCTCGCCAAAGGAATGCAAGGTCTGTTGAATGTCGTG
AAGGAAGCAGTTCCTCTGGAAGCTTCTTGAAGACAAACAACGTCTGTAGC
GACCCTTTGCAGGCAGCGGAACCCCCCACCTGGCGACAGGTGCCTCTGCG
GCCAAAAGCCACGTGTATAAGATACACCTGCAAAGGCGGCACAACCCCAG
TGCCACGTTGTGAGTTGGATAGTTGTGGAAAGAGTCAAATGGCTCTCTTC
AAGCGTATTCAACAAGGGGCTGAAGGATGCCCAGAAGGTACCCCATTGTA
TGGGATCTGATCTGGGGCCTCGGTGCAGATGCTTTACATGTGTTTAGTCG
AGGTTAAAAAAACGTCTAGGCCCCCCGAACCACGGGGACGTGGTTTTCCT
TTGAAAAACACGATGATAATATGGCCACAACCATGGGATGGTCCTGCATC
ATCCTGTTTCTGGTGGCCACAGCCACAGGCGCTCACTCCGAGGTGCAATT
GCTGGAATCCGGCGGAGGACTGGTGCAGCCTGGCGGCTCCCTGAGACTGT
CTTGCGCCGCCTCCGGCTTCACCTTCTCCCACTACATCATGATGTGGGTG
CGACAGGCTCCTGGCAAGGGGCTGGAATGGGTGTCCGGCATCTACTCCTC
CGGCGGCATCACCGTGTACGCCGACTCCGTGAAGGGCCGGTTCACCATCT
CTCGGGACAACTCCAAGAACACCCTGTACCTGCAGATGAACTCCCTGCGG
GCCGAGGACACCGCCGTGTACTACTGCGCCTACCGGCGGATCGGCGTGCC
CAGACGGGACGAGTTCGACATCTGGGGGCAGGGCACCATGGTGACAGTGT
CCTCCGCCTCCACCAAGGGCCCCTCTGTGTTCCCGCTAGCACCCTCCAGC
AAGTCCACCTCCGGCGGCACCGCTGCTCTGGGCTGCCTCGTCAAGGACTA
CTTCCCCGAGCCCGTGACCGTGTCCTGGAACTCTGGCGCCCTGACCAGCG
GAGTGCATACCTTCCCTGCCGTGCTCCAGTCCTCCGGCCTGTACAGCCTG
TCCTCTGTCGTGACCGTGCCCTCCAGCTCCCTGGGCACCCAGACCTACAT
CTGCAACGTGAACCACAAGCCCTCCAACACCAAAGTGGACAAGCGGGTGG
AACCCAAGTCCTGCGACACCCACACCTGTCCCCCTTGCCCTGCCCCTGAA
CTGCTGGGCGGACCCAGCGTGTTCCTGTTCCCCCCAAAGCCCAAGGACAC
CCTGATGATCTCCCGGACCCCCGAAGTGACCTGCGTGGTGGTGGACGTGT
CCCACGAGGACCCTGAAGTGAAGTTTAATTGGTACGTGGACGGCGTGGAA
GTGCATAACGCCAAGACCAAGCCCAGAGAGGAACAGTACAACTCCACCTA
CCGGGTGGTGTCCGTGCTGACCGTGCTGCACCAGGACTGGCTGAACGGCA
AAGAGTACAAGTGCAAGGTGTCCAACAAGGCCCTGCCTGCCCCCATCGAA
AAGACCATCAGCAAGGCCAAGGGCCAGCCTCGCGAGCCCCAGGTGTACAC
CCTGCCCCCTAGCCGGGAAGAGATGACCAAGAACCAGGTGTCCCTGACCT
GTCTGGTCAAGGGCTTCTACCCCTCCGATATCGCCGTGGAATGGGAGTCC
AACGGCCAGCCCGAGAACAACTACAAGACCACCCCCCCTGTGCTGGACAG
CGACGGCTCATTCTTCCTGTACTCCAAGCTGACCGTGGACAAGTCCCGGT
GGCAGCAGGGCAACGTGTTCTCCTGCTCCGTGATGCACGAGGCCCTGCAC
AACCACTACACCCAGAAGTCCCTGTCCCTGTCTCCCGGCAAGTCTGGCGG
AGGATCCGAAGTGCAGCTGCTGGAAAGCGGCGGAGGACTGGTGCAGCCTG
GAGGCAGCCTGAGACTGTCTTGCGCCGCCAGCGGCTTCACCTTCAGCGGC
TACATCATGGCCTGGGTCCGACAGGCTCCAGGCAAGGGCCTGGAATGGGT
GTCCTACATCTACCCCAGCGGCGGCATCACCGTGTACGCCGACAGCGTGA
AGGGCCGGTTCACCATCAGCCGGGACAACAGCAAGAACACCCTGTACCTG
CAGATGAACAGCCTGCGGGCCGAGGACACCGCCGTGTACTACTGCACCCG
GCAGCGGTACAGAGGCCCCAAGTACTACTACTACATGGACGTGTGGGGCA
AGGGCACCACCGTGACCGTGTCTAGCGGAGGCGGAGGATCTGGCGGAGGT
GGAAGTGGTGGTGGCGGAAGTGGCGGCGGAGGCAGCGACATCCAGATGAC
CCAGAGCCCCCTGAGCCTGCCCGTGACACCTGGCGAGCCTGCCAGCATCA
GCTGCAGAAGCAGCCAGAGCCTGCTGCACAGCAACGGCTACAACTACCTG
GACTGGTATCTGCAGAAGCCCGGCCAGTCCCCCCAGCTGCTGATCTACCT
GGGCAGCAACAGAGCCAGCGGCGTGCCCGACAGATTCAGCGGCAGCGGCT
CCGGCACCGACTTCACCCTGAAGATCAGCCGGGTGGAAGCCGAGGACGTG
GGCGTGTACTATTGCATGCAGGCCCTGCAGACCCCCTGGACCTTCGGCCA
GGGCACCAAGGTGGAAATCAAGAGATGAATCTAGA
X0122-C01

(SEQ ID NO: 33)

ATGGGATGGTCCTGCATCATCCTGTTTCTGGTGGCTACAGCCACAGGCGT
GCACTCCGACATCCAGATGACCCAGTCCCCCTCCACCCTGTCCGCCTCTG
TGGGCGACAGAGTGACCATCACCTGTCGGGCCTCCCAGTCCATCTCCAGC
TGGCTGGCCTGGTATCAGCAGAAGCCCGGCAAGGCCCCCAAGCTGCTGAT
CTACAAGGCCAGCACCCTGGAATCCGGCGTGCCCTCCAGATTCTCCGGCT
CTGGCTCCGGCACCGAGTTCACCCTGACCATCAGCTCCCTGCAGCCCGAC
GACTTCGCCACCTACTACTGCCAGCAGTACAACACCTACTGGACCTTCGG
CCAGGGCACCAAGGTGGAAATCAAGCGGACCGTGGCCGCTCCCTCCGTGT
TCATCTTCCCACCCTCCGACGAGCAGCTGAAGTCCGGCACCGCCTCCGTG
GTCTGCCTGCTGAACAACTTCTACCCCCGCGAGGCCAAGGTGCAGTGGAA
GGTGGACAACGCCCTGCAGTCCGGCAACTCCCAGGAATCCGTGACCGAGC
AGGACTCCAAGGACAGCACCTACTCCCTGTCCTCTACCCTGACCCTGTCC
AAGGCCGACTACGAGAAGCACAAGGTGTACGCCTGCGAAGTGACCCACCA
GGGCCTGTCCAGCCCCGTGACCAAGTCCTTCAACCGGGGCGAGTGCTGAT
GAGGCGCGCCTTCGCGTCGAGCATGCATCTAGGGCGGCCAATTCCGCCCC
TCTCCCCCCCCCCCCCTAACGTTACTGGCCGAAGCCGCTTGGAATAAGGC
CGGTGTGCGTTTGTCTATATGTTATTTTCCACCATATTGCCGTCTTTTGG
CAATGTGAGGGCCCGGAAACCTGGCCCTGTCTTCTTGACGAGCATTCCTA
GGGGTCTTTCCCCTCTCGCCAAAGGAATGCAAGGTCTGTTGAATGTCGTG
AAGGAAGCAGTTCCTCTGGAAGCTTCTTGAAGACAAACAACGTCTGTAGC
GACCCTTTGCAGGCAGCGGAACCCCCCACCTGGCGACAGGTGCCTCTGCG
GCCAAAAGCCACGTGTATAAGATACACCTGCAAAGGCGGCACAACCCCAG
TGCCACGTTGTGAGTTGGATAGTTGTGGAAAGAGTCAAATGGCTCTCTTC
AAGCGTATTCAACAAGGGGCTGAAGGATGCCCAGAAGGTACCCCATTGTA
TGGGATCTGATCTGGGGCCTCGGTGCAGATGCTTTACATGTGTTTAGTCG
AGGTTAAAAAAACGTCTAGGCCCCCCGAACCACGGGGACGTGGTTTTCCT
TTGAAAAACACGATGATAATATGGCCACAACCATGGGATGGTCCTGCATC
ATCCTGTTTCTGGTGGCCACAGCCACAGGCGCTCACTCCGAGGTGCAATT
GCTGGAATCCGGCGGAGGACTGGTGCAGCCTGGCGGCTCCCTGAGACTGT
CTTGCGCCGCCTCCGGCTTCACCTTCTCCCACTACATCATGATGTGGGTG
CGACAGGCTCCTGGCAAGGGGCTGGAATGGGTGTCCGGCATCTACTCCTC
CGGCGGCATCACCGTGTACGCCGACTCCGTGAAGGGCCGGTTCACCATCT
CTCGGGACAACTCCAAGAACACCCTGTACCTGCAGATGAACTCCCTGCGG
GCCGAGGACACCGCCGTGTACTACTGCGCCTACCGGCGGATCGGCGTGCC
CAGACGGGACGAGTTCGACATCTGGGGGCAGGGCACCATGGTGACAGTGT
CCTCCGCCTCCACCAAGGGCCCCTCTGTGTTCCCGCTAGCACCCTCCAGC
AAGTCCACCTCCGGCGGCACCGCTGCTCTGGGCTGCCTCGTCAAGGACTA
CTTCCCCGAGCCCGTGACCGTGTCCTGGAACTCTGGCGCCCTGACCAGCG
GAGTGCATACCTTCCCTGCCGTGCTCCAGTCCTCCGGCCTGTACAGCCTG
TCCTCTGTCGTGACCGTGCCCTCCAGCTCCCTGGGCACCCAGACCTACAT
CTGCAACGTGAACCACAAGCCCTCCAACACCAAAGTGGACAAGCGGGTGG
AACCCAAGTCCTGCGACACCCACACCTGTCCCCCTTGCCCTGCCCCTGAA
CTGCTGGGCGGACCCAGCGTGTTCCTGTTCCCCCCAAAGCCCAAGGACAC
CCTGATGATCTCCCGGACCCCCGAAGTGACCTGCGTGGTGGTGGACGTGT
CCCACGAGGACCCTGAAGTGAAGTTTAATTGGTACGTGGACGGCGTGGAA
GTGCATAACGCCAAGACCAAGCCCAGAGAGGAACAGTACAACTCCACCTA
CCGGGTGGTGTCCGTGCTGACCGTGCTGCACCAGGACTGGCTGAACGGCA
AAGAGTACAAGTGCAAGGTGTCCAACAAGGCCCTGCCTGCCCCCATCGAA
AAGACCATCAGCAAGGCCAAGGGCCAGCCTCGCGAGCCCCAGGTGTACAC
CCTGCCCCCTAGCCGGGAAGAGATGACCAAGAACCAGGTGTCCCTGACCT
GTCTGGTCAAGGGCTTCTACCCCTCCGATATCGCCGTGGAATGGGAGTCC
AACGGCCAGCCCGAGAACAACTACAAGACCACCCCCCCTGTGCTGGACAG
CGACGGCTCATTCTTCCTGTACTCCAAGCTGACCGTGGACAAGTCCCGGT
GGCAGCAGGGCAACGTGTTCTCCTGCTCCGTGATGCACGAGGCCCTGCAC
AACCACTACACCCAGAAGTCCCTGTCCCTGTCTCCCGGCAAGTCTGGCGG
AGGATCCGACATCCAGATGACCCAGAGCCCCCTGAGCCTGCCCGTGACAC
CTGGCGAGCCTGCCAGCATCAGCTGCAGAAGCAGCCAGAGCCTGCTGCAC
AGCAACGGCTACAACTACCTGGACTGGTATCTGCAGAAGCCCGGCCAGTC
CCCCCAGCTGCTGATCTACCTGGGCAGCAACAGAGCCAGCGGCGTGCCCG
ACAGATTCAGCGGCAGCGGCTCCGGCACCGACTTCACCCTGAAGATCAGC
CGGGTCGAAGCCGAGGACGTGGGCGTGTACTACTGCATGCAGGCCCTGCA
GACCCCCTGGACCTTCGGCCAGGGCACCAAGGTGGAAATCAAGCGGACAG
GCGGCGGAGGCTCTGGCGGAGGTGGAAGCGGAGGCGGAGGAAGTGGCGGA
GGCGGCTCTGAGGTGCAGCTGCTGGAATCTGGCGGCGGACTGGTGCAGCC
TGGCGGCAGCCTGAGACTGTCTTGCGCCGCCAGCGGCTTCACCTTCAGCG
GCTACATCATGGCCTGGGTCCGACAGGCCCCTGGCAAGGGCCTGGAATGG
GTGTCCTACATCTACCCCAGCGGCGGCATCACCGTGTACGCCGACAGCGT
GAAGGGCCGGTTCACCATCAGCCGGGACAACAGCAAGAACACCCTGTACC
TGCAGATGAACAGCCTGCGGGCCGAGGACACCGCCGTGTACTATTGCACC
CGGCAGCGGTACAGAGGCCCCAAGTACTACTACTACATGGACGTGTGGGG
CAAGGGCACCACCGTGACCGTGTCCAGCTGAATCTAGA

[0158] pRH1 expression plasmids encoding the above-noted bispecific antibodies were generated. Following 0.2 um sterile filtration, the plasmids were transfected into 60 mL d1 cultures of Expi293F™ cells, cultured in Expi293™ expression medium, using ExpiFectamine™ as a transfection reagent, as described by the LifeTech protocol (Life Technologies™, Carlsbad, Calif.). Expifectamine™ transfection enhancers 1 and 2 were added on day 2 of culture as described in LifeTech protocol. Cultures were incubated at 37C, 8% CO₂, 140 rpm through day 7. Cultures were harvested by centrifugation followed by 0.2 um sterile filtration and stored at 4° C. Clones were batch purified using a protein A column.

[0159] Varying concentrations of the bispecific antibodies were incubated with individual FXIIa and pKal samples, and the ability of these proteases to cleave a peptide substrate was monitored over time by measuring changes in the fluorescence of a chemical moiety covalently attached to the peptide substrate. Slopes of this kinetic data are equivalent to enzymatic proteolytic rates, which are then plotted against the concentration of the inhibitor. The resulting plots are then fit to a tight binding inhibitor equation (Equation 1) by nonlinear regression to obtain apparent inhibition constants (Kᵢ^{app}).

$$v = {V}_{0} \cdot \frac{\begin{matrix}( [ E ] - [ I ] - {K}_{i}^{app} ) + \\ \sqrt{{( [ E ] - [ I ] - {K}_{i}^{app} )}^{2} - 4 [ E ] \cdot } {K}_{i}^{app}\end{matrix}}{2} \qquad [ Equation 1 ]$$

[0160] FIGS. 1 and 2 show the plots of pKal and FXIIa inhibition activities for each bispecific antibody tested. All clones tested were able to inhibit both pKal and FXIIa. The Kᵢ^{app} pKal and FXIIa for each bispecific antibody is listed below in Table 3.

TABLE 3
Apparent inhibition constants for bispecific antibodies

| Bispecific antibody | Kᵢ^{app} pKal (nM) | Kᵢ^{app} FXIIa (nM) |
|---|---|---|
| X120-A01 | 0.1376 +/− 0.0206 | 0.0515 +/− 0.0186 |
| X121-E01 | 0.1593 +/− 0.0245 | 0.6114 +/− 0.0714 |
| X122-A01 | 0.1693 +/− 0.0242 | 6.0467 +/− 0.6497 |
| X122-C01 | 0.1610 +/− 0.0221 | 5.6900 +/− 0.6512 |
| Control M71-F06 IgG | N/A | 0.8758 +/− 0.0579 |

### EXAMPLE 2

### Construction and Characterization of Exemplary Bispecific Antibodies that Bind pKal and Factor XIIa

[0161] Another exemplary set of anti-pKal/anti-FXIIa bispecific antibodies was constructed as follows. The IgG portion of the molecule was the same as used in Example 1, i.e., DX-2930. For the anti-FXIIa component, 36 isolates were chosen and were converted to scFvs in both the Light/Heavy and Heavy/Light orientations. The scFvs were fused to the DX-2930 IgG using an SGGGS (SEQ ID NO: 22) linker. When constructing the scFvs, a (G₄5)₄ linker was used to fuse the anti-FXIIa variable heavy and variable light domains to each other. The sequences of the bi-specific antibodies are provided below.

[0162] The constructed bispecific molecules showed anti-pKal activity generally consistent with values previously determined for DX-2930 (Table 4). Some values showed less potency against pKal, possibly due to errors in calculating concentration, or possibly due to aggregation. The anti-FXIIa activity of the scFv component was typically lower than the previously determined values, possibly due to inherent instability associated with scFvs (Table 4). The activity of the bispecific molecules in the plasma assay showed marked improvement over DX-2930 and the anti-FXIIa IgGs. DX-2930 showed a range between 70-100 nM in this assay, while the anti-FXIIa parent antibody showed inhibition in the ˜100 nM range. A panel of the bispecific molecules tested show inhibition in the 1-10 nM range (Table 5).

[0163] Five exemplary candidates (620I-X0136-D12, 620I-X0136-C05, 620I-X0136-C11, 620I-X0136-G05, and 620I-X0136-A01) were selected for further analysis. Of these 5 lead candidates, 620I-X0136-A01 was eliminated due to low expression values and multiple species in the size exclusion chromatography (SEC) traces. Of the remaining 4 lead candidates, each isolate contained a varying degree of High Molecular Weight aggregate (16-35%) (FIG. 3). This aggregate was determined to be concentration-dependent and was hypothesized to be dimeric structures interacting through the scFv domains.

[0164] An exemplary bispecific antibody, 620I-X0136-D12 (D12) was assessed for its ability to inhibit plasma pKal activity by the plasma inhibition assay. Briefly, reconstituted plasma containing quantities of pre-pKal and FXII in the presence or absence of HMWK was diluted 1: 40 in an assay buffer (20 mM Tris-HCl pH 7.5, 150 mM NaCl, 1 mM EDTA, 0.1% PEG-8000 and 0.1% Triton X-100). The concentrations of pre-pKal, FXII, and HMWK are equivalent to their normal concentrations in plasma. Inhibitors were added to the reconstituted plasma at varying concentrations in a 96-well microplate at room temperature. Contact activation was then initiated by the addition of 25% (2.5% final) of a dilute ellagic acid solution, the microplate was mixed by gentle shaking, and allowed to proceed for 2 minutes at room temperature, whereby 100 nM of CTI was added. 10 μl of this mixture was then removed to a replicate microplate containing 80 pi of assay buffer at pre-equilibrated at 30C. This dilution plate was then incubated a further 5 minutes at 30C, and proteolysis of PFR-AMC assessed as above, but with back-calculated concentrations of inhibitor used in the X-axis for curve-fitting to a modified Morrison equation for tight binding inhibitors (plasma was diluted 1: 400 in final assay read). The results of this study are shown in FIG. 5 (in the presence of one-chain HMWK) and FIG. 6 (in the absence of HMWK). The bispecific antibody performed better than the sum of the parent IgGs, particularly in the presence of HMWK. Using the tight binding inhibitor equation, the apparent Ki values of D12 were determined to be 8.8 nM in the presence of HMWK and 2.6 nM in the absence of HMWK.

[0165] The bispecific antibody candidate 620I-X0136-D12 (D12) was also assessed for its ability to delay activated partial thromboplastin time (APTT) in an APTT assay compared to an anti-FXIIa antibody (D06) and an anti-pKal antibody (H03) (FIG. 7). Briefly, inhibitors molecules (or control dilution buffer=25 mM HEPES, pH 7.5, 125 mM NaCl) were added at three concentrations (25, 50, 100) to neat plasma in a 1:1 mixture, and pre-equilibrated at 37° C. for 5 minutes. 2×50 pi of this mix was dispensed to 2 separate KC4 Delta assay cuvettes (with metal ball). After 60 seconds, 50 μl of aPTT reagent (activator, Pacific Hemostasis APTT-XL) was added to the rotating cuvettes, and 180 seconds after aPTT addition (at t=0 secs), 50 μl of CaCl2 was added. The KC4 Delta instrument recorded the time of coagulation in seconds.

[0166] The bispecific antibody candidate 620I-X0136-D12 (D12) was also assessed for its ability to inhibit fibrin formation (FIG. 8).

[0167] Antibody sequences: All bispecific molecules described in this Example contained a first polypeptide comprising the DX-2930 Heavy Chain, a SGGGS linker, and an anti-FXIIa scFv in either the Heavy/Light or Light/Heavy orientations. The DX-2930 Light Chain was also expressed using the same vector. Only the Heavy Chain+scFv sequences are listed for each isolate.

>DX-2930 Light Chain (without signal sequence)

(SEQ ID NO: 46)

DIQMTQSPSTLSASVGDRVTITCRASQSISSWLAWYQQKPGKAPKLLIYK
ASTLESGVPSRFSGSGSGTEFTLTISSLQPDDFATYYCQQYNTYWTFGQG
TKVEIKRTVAAPSVFIFPPSDEQLKSGTASVVCLLNNFYPREAKVQWKVD
NALQSGNSQESVTEQDSKDSTYSLSSTLTLSKADYEKHKVYACEVTHQGL
SSPVTKSFNRGEC
Bispecifics derived from 36 exemplary anti-FXIIa
IgGs:
>620I-X0136-C07 = DX2930 Heavy Chain +
559C-M0177-B11 L4H scFv

(SEQ ID NO: 51)

EVQLLESGGGLVQPGGSLRLSCAASGFTFSHYIMMWVRQAPGKGLEWVSG
IYSSGGITVYADSVKGRFTISRDNSKNTLYLQMNSLRAEDTAVYYCAYRR
IGVPRRDEFDIWGQGTMVTVSSASTKGPSVFPLAPSSKSTSGGTAALGCL
VKDYFPEPVTVSWNSGALTSGVHTFPAVLQSSGLYSLSSVVTVPSSSLGT
QTYICNVNHKPSNTKVDKRVEPKSCDKTHTCPPCPAPELLGGPSVFLFPP
KPKDTLMISRTPEVTCVVVDVSHEDPEVKFNWYVDGVEVHNAKTKPREEQ
YNSTYRVVSVLTVLHQDWLNGKEYKCKVSNKALPAPIEKTISKAKGQPRE
PQVYTLPPSREEMTKNQVSLTCLVKGFYPSDIAVEWESNGQPENNYKTTP
PVLDSDGSFFLYSKLTVDKSRWQQGNVFSCSVMHEALHNHYTQKSLSLSP
GKSGGGSEVQLLESGGGLVQPGGSLRLSCAASGFTFSRYIMVWVRQAPGK
GLEWVSRIYPSGGYTRYADSVKGRFTISRDNSKNTLYLQMNSLRAEDTAV
YYCTRQRYRGPKYYYYMDVWGKGTTVTVSSGGGGSGGGGSGGGGSGGGGS
DIQMTQSPLSLPVTPGEPASISCRSSQSLLHSNGYNYLDWYLQKPGQSPQ
LLIYLGSNRASGVPDRFSGSGSGTDFTLKISRVEAEDVGVYYCMQALQTP
WTFGQGTKVEIKR
>620I-X0138-A08 = DX2930 Heavy Chain +
559C-M0177-B11 H4L scFv

(SEQ ID NO: 52)

EVQLLESGGGLVQPGGSLRLSCAASGFTFSHYIMMWVRQAPGKGLEWVSG
IYSSGGITVYADSVKGRFTISRDNSKNTLYLQMNSLRAEDTAVYYCAYRR
IGVPRRDEFDIWGQGTMVTVSSASTKGPSVFPLAPSSKSTSGGTAALGCL
VKDYFPEPVTVSWNSGALTSGVHTFPAVLQSSGLYSLSSVVTVPSSSLGT
QTYICNVNHKPSNTKVDKRVEPKSCDKTHTCPPCPAPELLGGPSVFLFPP
KPKDTLMISRTPEVTCVVVDVSHEDPEVKFNWYVDGVEVHNAKTKPREEQ
YNSTYRVVSVLTVLHQDWLNGKEYKCKVSNKALPAPIEKTISKAKGQPRE
PQVYTLPPSREEMTKNQVSLTCLVKGFYPSDIAVEWESNGQPENNYKTTP
PVLDSDGSFFLYSKLTVDKSRWQQGNVFSCSVMHEALHNHYTQKSLSLSP
GKSGGGSDIQMTQSPLSLPVTPGEPASISCRSSQSLLHSNGYNYLDWYLQ
KPGQSPQLLIYLGSNRASGVPDRFSGSGSGTDFTLKISRVEAEDVGVYYC
MQALQTPWTFGQGTKVEIKRTGGGGSGGGGSGGGGSGGGGSEVQLLESGG
GLVQPGGSLRLSCAASGFTFSRYIMVWVRQAPGKGLEWVSRIYPSGGYTR
YADSVKGRFTISRDNSKNTLYLQMNSLRAEDTAVYYCTRQRYRGPKYYYY
MDVWGKGTTVTVSS
>620I-X0136-B02 = DX2930 Heavy Chain +
559C-M0177-C12 L4H scFv

(SEQ ID NO: 53)

EVQLLESGGGLVQPGGSLRLSCAASGFTFSHYIMMWVRQAPGKGLEWVSG
IYSSGGITVYADSVKGRFTISRDNSKNTLYLQMNSLRAEDTAVYYCAYRR
IGVPRRDEFDIWGQGTMVTVSSASTKGPSVFPLAPSSKSTSGGTAALGCL
VKDYFPEPVTVSWNSGALTSGVHTFPAVLQSSGLYSLSSVVTVPSSSLGT
QTYICNVNHKPSNTKVDKRVEPKSCDKTHTCPPCPAPELLGGPSVFLFPP
KPKDTLMISRTPEVTCVVVDVSHEDPEVKFNWYVDGVEVHNAKTKPREEQ
YNSTYRVVSVLTVLHQDWLNGKEYKCKVSNKALPAPIEKTISKAKGQPRE
PQVYTLPPSREEMTKNQVSLTCLVKGFYPSDIAVEWESNGQPENNYKTTP
PVLDSDGSFFLYSKLTVDKSRWQQGNVFSCSVMHEALHNHYTQKSLSLSP
GKSGGGSEVQLLESGGGLVQPGGSLRLSCAASGFTFSFYHMHWVRQAPGK
GLEWVSRIVPSGGMTRYADSVKGRFTISRDNSKNTLYLQMNSLRAEDTAV
YYCTRQRYRGPKYYYYMDVWGKGTTVTVSSGGGGSGGGGSGGGGSGGGGS
DIQMTQSPLSLPVTPGEPASISCRSSQSLLHSNGYNYLDWYLQKPGQSPQ
LLIYLGSNRASGVPDRFSGSGSGTDFTLKISRVEAEDVGVYYCMQALQTP
WTFGQGTKVEIKR
>620I-X0139-A12 = DX2930 Heavy Chain +
559C-M0177-C12 H4L scFv

(SEQ ID NO: 54)

EVQLLESGGGLVQPGGSLRLSCAASGFTFSHYIMMWVRQAPGKGLEWVSG
IYSSGGITVYADSVKGRFTISRDNSKNTLYLQMNSLRAEDTAVYYCAYRR
IGVPRRDEFDIWGQGTMVTVSSASTKGPSVFPLAPSSKSTSGGTAALGCL
VKDYFPEPVTVSWNSGALTSGVHTFPAVLQSSGLYSLSSVVTVPSSSLGT
QTYICNVNHKPSNTKVDKRVEPKSCDKTHTCPPCPAPELLGGPSVFLFPP
KPKDTLMISRTPEVTCVVVDVSHEDPEVKFNWYVDGVEVHNAKTKPREEQ
YNSTYRVVSVLTVLHQDWLNGKEYKCKVSNKALPAPIEKTISKAKGQPRE
PQVYTLPPSREEMTKNQVSLTCLVKGFYPSDIAVEWESNGQPENNYKTTP
PVLDSDGSFFLYSKLTVDKSRWQQGNVFSCSVMHEALHNHYTQKSLSLSP
GKSGGGSDIQMTQSPLSLPVTPGEPASISCRSSQSLLHSNGYNYLDWYLQ
KPGQSPQLLIYLGSNRASGVPDRFSGSGSGTDFTLKISRVEAEDVGVYYC
MQALQTPWTFGQGTKVEIKRTGGGGSGGGGSGGGGSGGGGSEVQLLESGG
GLVQPGGSLRLSCAASGFTFSFYHMHWVRQAPGKGLEWVSRIVPSGGMTR
YADSVKGRFTISRDNSKNTLYLQMNSLRAEDTAVYYCTRQRYRGPKYYYY
MDVWGKGTTVTVSS
>620I-X0137-B08 = DX2930 Heavy Chain +
559C-M0178-A08 L4H scFv

(SEQ ID NO: 55)

EVQLLESGGGLVQPGGSLRLSCAASGFTFSHYIMMWVRQAPGKGLEWVSG
IYSSGGITVYADSVKGRFTISRDNSKNTLYLQMNSLRAEDTAVYYCAYRR
IGVPRRDEFDIWGQGTMVTVSSASTKGPSVFPLAPSSKSTSGGTAALGCL
VKDYFPEPVTVSWNSGALTSGVHTFPAVLQSSGLYSLSSVVTVPSSSLGT
QTYICNVNHKPSNTKVDKRVEPKSCDKTHTCPPCPAPELLGGPSVFLFPP
KPKDTLMISRTPEVTCVVVDVSHEDPEVKFNWYVDGVEVHNAKTKPREEQ
YNSTYRVVSVLTVLHQDWLNGKEYKCKVSNKALPAPIEKTISKAKGQPRE
PQVYTLPPSREEMTKNQVSLTCLVKGFYPSDIAVEWESNGQPENNYKTTP
PVLDSDGSFFLYSKLTVDKSRWQQGNVFSCSVMHEALHNHYTQKSLSLSP
GKSGGGSEVQLLESGGGLVQPGGSLRLSCAASGFTFSFYIMGWVRQAPGK
GLEWVSRIYPSGGATQYADSVKGRFTISRDNSKNTLYLQMNSLRAEDTAV
YYCTRQRYRGPKYYYYMDVWGKGTTVTVSSGGGGSGGGGSGGGGSGGGGS
DIQMTQSPLSLPVTPGEPASISCRSSQSLLHSNGYNYLDWYLQKPGQSPQ
LLIYLGSNRASGVPDRFSGSGSGTDFTLKISRVEAEDVGVYYCMQALQTP
WTFGQGTKVEIKR
>620I-X0142-A04 = DX2930 Heavy Chain +
559C-M0178-A08 H4L scFv

(SEQ ID NO: 56)

EVQLLESGGGLVQPGGSLRLSCAASGFTFSHYIMMWVRQAPGKGLEWVSG
IYSSGGITVYADSVKGRFTISRDNSKNTLYLQMNSLRAEDTAVYYCAYRR
IGVPRRDEFDIWGQGTMVTVSSASTKGPSVFPLAPSSKSTSGGTAALGCL
VKDYFPEPVTVSWNSGALTSGVHTFPAVLQSSGLYSLSSVVTVPSSSLGT
QTYICNVNHKPSNTKVDKRVEPKSCDKTHTCPPCPAPELLGGPSVFLFPP
KPKDTLMISRTPEVTCVVVDVSHEDPEVKFNWYVDGVEVHNAKTKPREEQ
YNSTYRVVSVLTVLHQDWLNGKEYKCKVSNKALPAPIEKTISKAKGQPRE
PQVYTLPPSREEMTKNQVSLTCLVKGFYPSDIAVEWESNGQPENNYKTTP
PVLDSDGSFFLYSKLTVDKSRWQQGNVFSCSVMHEALHNHYTQKSLSLSP
GKSGGGSDIQMTQSPLSLPVTPGEPASISCRSSQSLLHSNGYNYLDWYLQ
KPGQSPQLLIYLGSNRASGVPDRFSGSGSGTDFTLKISRVEAEDVGVYYC
MQALQTPWTFGQGTKVEIKRTGGGGSGGGGSGGGGSGGGGSEVQLLESGG
GLVQPGGSLRLSCAASGFTFSFYIMGWVRQAPGKGLEWVSRIYPSGGATQ
YADSVKGRFTISRDNSKNTLYLQMNSLRAEDTAVYYCTRQRYRGPKYYYY
MDVWGKGTTVTVSS
>620I-X0142-B11 = DX2930 Heavy Chain +
559C-M0179-A03 L4H scFv

(SEQ ID NO: 57)

EVQLLESGGGLVQPGGSLRLSCAASGFTFSHYIMMWVRQAPGKGLEWVSG
IYSSGGITVYADSVKGRFTISRDNSKNTLYLQMNSLRAEDTAVYYCAYRR
IGVPRRDEFDIWGQGTMVTVSSASTKGPSVFPLAPSSKSTSGGTAALGCL
VKDYFPEPVTVSWNSGALTSGVHTFPAVLQSSGLYSLSSVVTVPSSSLGT
QTYICNVNHKPSNTKVDKRVEPKSCDKTHTCPPCPAPELLGGPSVFLFPP
KPKDTLMISRTPEVTCVVVDVSHEDPEVKFNWYVDGVEVHNAKTKPREEQ
YNSTYRVVSVLTVLHQDWLNGKEYKCKVSNKALPAPIEKTISKAKGQPRE
PQVYTLPPSREEMTKNQVSLTCLVKGFYPSDIAVEWESNGQPENNYKTTP
PVLDSDGSFFLYSKLTVDKSRWQQGNVFSCSVMHEALHNHYTQKSLSLSP
GKSGGGSEVQLLESGGGLVQPGGSLRLSCAASGFTFSGYIMAWVRQAPGK
GLEWVSYIYPSGGITVYADSVKGRFTISRDNSKNTLYLQMNSLRAEDTAV
YYCTRQRYRGPKYYYYMDVWGKGTTVTVSSGGGGSGGGGSGGGGSGGGGS
DIQMTQSPLSLPVTPGEPASISCRSSQSLLHSNGYNYLDWYLQKPGQSPQ
LLIYLGSNRASGVPDRFSGSGSGTDFTLKISRVEAEDIGVYYCMQGRHRP
YTFGQGTRLEIKR
>620I-X0138-B01 = DX2930 Heavy Chain +
559C-M0179-A03 H4L scFv

(SEQ ID NO: 58)

EVQLLESGGGLVQPGGSLRLSCAASGFTFSHYIMMWVRQAPGKGLEWVSG
IYSSGGITVYADSVKGRFTISRDNSKNTLYLQMNSLRAEDTAVYYCAYRR
IGVPRRDEFDIWGQGTMVTVSSASTKGPSVFPLAPSSKSTSGGTAALGCL
VKDYFPEPVTVSWNSGALTSGVHTFPAVLQSSGLYSLSSVVTVPSSSLGT
QTYICNVNHKPSNTKVDKRVEPKSCDKTHTCPPCPAPELLGGPSVFLFPP
KPKDTLMISRTPEVTCVVVDVSHEDPEVKFNWYVDGVEVHNAKTKPREEQ
YNSTYRVVSVLTVLHQDWLNGKEYKCKVSNKALPAPIEKTISKAKGQPRE
PQVYTLPPSREEMTKNQVSLTCLVKGFYPSDIAVEWESNGQPENNYKTTP
PVLDSDGSFFLYSKLTVDKSRWQQGNVFSCSVMHEALHNHYTQKSLSLSP
GKSGGGSDIQMTQSPLSLPVTPGEPASISCRSSQSLLHSNGYNYLDWYLQ
KPGQSPQLLIYLGSNRASGVPDRFSGSGSGTDFTLKISRVEAEDIGVYYC
MQGRHRPYTFGQGTRLEIKRTGGGGSGGGGSGGGGSGGGGSEVQLLESGG
GLVQPGGSLRLSCAASGFTFSGYIMAWVRQAPGKGLEWVSYIYPSGGITV
YADSVKGRFTISRDNSKNTLYLQMNSLRAEDTAVYYCTRQRYRGPKYYYY
MDVWGKGTTVTVSS
>620I-X0136-C01 = DX2930 Heavy Chain +
559C-M0182-B04 L4H scFv

(SEQ ID NO: 59)

EVQLLESGGGLVQPGGSLRLSCAASGFTFSHYIMMWVRQAPGKGLEWVSG
IYSSGGITVYADSVKGRFTISRDNSKNTLYLQMNSLRAEDTAVYYCAYRR
IGVPRRDEFDIWGQGTMVTVSSASTKGPSVFPLAPSSKSTSGGTAALGCL
VKDYFPEPVTVSWNSGALTSGVHTFPAVLQSSGLYSLSSVVTVPSSSLGT
QTYICNVNHKPSNTKVDKRVEPKSCDKTHTCPPCPAPELLGGPSVFLFPP
KPKDTLMISRTPEVTCVVVDVSHEDPEVKFNWYVDGVEVHNAKTKPREEQ
YNSTYRVVSVLTVLHQDWLNGKEYKCKVSNKALPAPIEKTISKAKGQPRE
PQVYTLPPSREEMTKNQVSLTCLVKGFYPSDIAVEWESNGQPENNYKTTP
PVLDSDGSFFLYSKLTVDKSRWQQGNVFSCSVMHEALHNHYTQKSLSLSP
GKSGGGSEVQLLESGGGLVQPGGSLRLSCAASGFTFSWYVMQWVRQAPGK
GLEWVSYIYPSGGHTKYADSVKGRFTISRDNSKNTLYLQMNSLRAEDTAV
YYCTRQRYRGPKYYYYMDVWGKGTTVTVSSGGGGSGGGGSGGGGSGGGGS
DIQMTQSPLSLPVTPGEPASISCRSSQSLLHSNGYNYLDWYLQKPGQSPQ
LLIYLGSNRASGVPDRFSGSGSGTDFTLKISRVEAEDVGVYYCMQALQTP
WTFGQGTKVEIKR
>620I-X0138-A12 = DX2930 Heavy Chain +
559C-M0182-B04 H4L scFv

(SEQ ID NO: 60)

EVQLLESGGGLVQPGGSLRLSCAASGFTFSHYIMMWVRQAPGKGLEWVSG
IYSSGGITVYADSVKGRFTISRDNSKNTLYLQMNSLRAEDTAVYYCAYRR
IGVPRRDEFDIWGQGTMVTVSSASTKGPSVFPLAPSSKSTSGGTAALGCL
VKDYFPEPVTVSWNSGALTSGVHTFPAVLQSSGLYSLSSVVTVPSSSLGT
QTYICNVNHKPSNTKVDKRVEPKSCDKTHTCPPCPAPELLGGPSVFLFPP
KPKDTLMISRTPEVTCVVVDVSHEDPEVKFNWYVDGVEVHNAKTKPREEQ
YNSTYRVVSVLTVLHQDWLNGKEYKCKVSNKALPAPIEKTISKAKGQPRE
PQVYTLPPSREEMTKNQVSLTCLVKGFYPSDIAVEWESNGQPENNYKTTP
PVLDSDGSFFLYSKLTVDKSRWQQGNVFSCSVMHEALHNHYTQKSLSLSP
GKSGGGSDIQMTQSPLSLPVTPGEPASISCRSSQSLLHSNGYNYLDWYLQ
KPGQSPQLLIYLGSNRASGVPDRFSGSGSGTDFTLKISRVEAEDVGVYYC
MQALQTPWTFGQGTKVEIKRTGGGGSGGGGSGGGGSGGGGSEVQLLESGG
GLVQPGGSLRLSCAASGFTFSWYVMQWVRQAPGKGLEWVSYIYPSGGHTK
YADSVKGRFTISRDNSKNTLYLQMNSLRAEDTAVYYCTRQRYRGPKYYYY
MDVWGKGTTVTVSS
>620I-X0136-A12 = DX2930 Heavy Chain +
559C-M0182-D04 L4H scFv

(SEQ ID NO: 61)

EVQLLESGGGLVQPGGSLRLSCAASGFTFSHYIMMWVRQAPGKGLEWVSG
IYSSGGITVYADSVKGRFTISRDNSKNTLYLQMNSLRAEDTAVYYCAYRR
IGVPRRDEFDIWGQGTMVTVSSASTKGPSVFPLAPSSKSTSGGTAALGCL
VKDYFPEPVTVSWNSGALTSGVHTFPAVLQSSGLYSLSSVVTVPSSSLGT
QTYICNVNHKPSNTKVDKRVEPKSCDKTHTCPPCPAPELLGGPSVFLFPP
KPKDTLMISRTPEVTCVVVDVSHEDPEVKFNWYVDGVEVHNAKTKPREEQ
YNSTYRVVSVLTVLHQDWLNGKEYKCKVSNKALPAPIEKTISKAKGQPRE
PQVYTLPPSREEMTKNQVSLTCLVKGFYPSDIAVEWESNGQPENNYKTTP
PVLDSDGSFFLYSKLTVDKSRWQQGNVFSCSVMHEALHNHYTQKSLSLSP
GKSGGGSEVQLLESGGGLVQPGGSLRLSCAASGFTFSMYTMNWVRQAPGK
GLEWVSRIYPSGGKTLYADSVKGRFTISRDNSKNTLYLQMNSLRAEDTAV
YYCTRQRYRGPKYYYYMDVWGKGTTVTVSSGGGGSGGGGSGGGGSGGGGS
DIQMTQSPLSLPVTPGEPASISCRSSQSLLHSNGYNYLDWYLQKPGQSPQ
LLIYLGSNRASGVPDRFSGSGSGTDFTLKISRVEAEDVGVYYCMQALQTP
WTFGQGTKVEIKR
>620I-X0138-A02 = DX2930 Heavy Chain +
559C-M0182-D04 H4L scFv

(SEQ ID NO: 62)

EVQLLESGGGLVQPGGSLRLSCAASGFTFSHYIMMWVRQAPGKGLEWVSG
IYSSGGITVYADSVKGRFTISRDNSKNTLYLQMNSLRAEDTAVYYCAYRR
IGVPRRDEFDIWGQGTMVTVSSASTKGPSVFPLAPSSKSTSGGTAALGCL
VKDYFPEPVTVSWNSGALTSGVHTFPAVLQSSGLYSLSSVVTVPSSSLGT
QTYICNVNHKPSNTKVDKRVEPKSCDKTHTCPPCPAPELLGGPSVFLFPP
KPKDTLMISRTPEVTCVVVDVSHEDPEVKFNWYVDGVEVHNAKTKPREEQ
YNSTYRVVSVLTVLHQDWLNGKEYKCKVSNKALPAPIEKTISKAKGQPRE
PQVYTLPPSREEMTKNQVSLTCLVKGFYPSDIAVEWESNGQPENNYKTTP
PVLDSDGSFFLYSKLTVDKSRWQQGNVFSCSVMHEALHNHYTQKSLSLSP
GKSGGGSDIQMTQSPLSLPVTPGEPASISCRSSQSLLHSNGYNYLDWYLQ
KPGQSPQLLIYLGSNRASGVPDRFSGSGSGTDFTLKISRVEAEDVGVYYC
MQALQTPWTFGQGTKVEIKRTGGGGSGGGGSGGGGSGGGGSEVQLLESGG
GLVQPGGSLRLSCAASGFTFSMYTMNWVRQAPGKGLEWVSRIYPSGGKTL
YADSVKGRFTISRDNSKNTLYLQMNSLRAEDTAVYYCTRQRYRGPKYYYY
MDVWGKGTTVTVSS
>620I-X0136-A05 = DX2930 Heavy Chain +
559C-M0182-H01 L4H scFv

(SEQ ID NO: 63)

EVQLLESGGGLVQPGGSLRLSCAASGFTFSHYIMMWVRQAPGKGLEWVSG
IYSSGGITVYADSVKGRFTISRDNSKNTLYLQMNSLRAEDTAVYYCAYRR
IGVPRRDEFDIWGQGTMVTVSSASTKGPSVFPLAPSSKSTSGGTAALGCL
VKDYFPEPVTVSWNSGALTSGVHTFPAVLQSSGLYSLSSVVTVPSSSLGT
QTYICNVNHKPSNTKVDKRVEPKSCDKTHTCPPCPAPELLGGPSVFLFPP
KPKDTLMISRTPEVTCVVVDVSHEDPEVKFNWYVDGVEVHNAKTKPREEQ
YNSTYRVVSVLTVLHQDWLNGKEYKCKVSNKALPAPIEKTISKAKGQPRE
PQVYTLPPSREEMTKNQVSLTCLVKGFYPSDIAVEWESNGQPENNYKTTP
PVLDSDGSFFLYSKLTVDKSRWQQGNVFSCSVMHEALHNHYTQKSLSLSP
GKSGGGSEVQLLESGGGLVQPGGSLRLSCAASGFTFSRYVMHWVRQAPGK
GLEWVSSIWPSGGMTKYADSVKGRFTISRDNSKNTLYLQMNSLRAEDTAV
YYCTRQRYRGPKYYYYMDVWGKGTTVTVSSGGGGSGGGGSGGGGSGGGGS
DIQMTQSPLSLPVTPGEPASISCRSSQSLLHSNGYNYLDWYLQKPGQSPQ
LLIYLGSNRASGVPDRFSGSGSGTDFTLKISRVEAEDVGVYYCMQALQTP
WTFGQGTKVEIKR
>620I-X0138-C07 = DX2930 Heavy Chain +
559C-M0182-H01 H4L scFv

(SEQ ID NO: 64)

EVQLLESGGGLVQPGGSLRLSCAASGFTFSHYIMMWVRQAPGKGLEWVSG
IYSSGGITVYADSVKGRFTISRDNSKNTLYLQMNSLRAEDTAVYYCAYRR
IGVPRRDEFDIWGQGTMVTVSSASTKGPSVFPLAPSSKSTSGGTAALGCL
VKDYFPEPVTVSWNSGALTSGVHTFPAVLQSSGLYSLSSVVTVPSSSLGT
QTYICNVNHKPSNTKVDKRVEPKSCDKTHTCPPCPAPELLGGPSVFLFPP
KPKDTLMISRTPEVTCVVVDVSHEDPEVKFNWYVDGVEVHNAKTKPREEQ
YNSTYRVVSVLTVLHQDWLNGKEYKCKVSNKALPAPIEKTISKAKGQPRE
PQVYTLPPSREEMTKNQVSLTCLVKGFYPSDIAVEWESNGQPENNYKTTP
PVLDSDGSFFLYSKLTVDKSRWQQGNVFSCSVMHEALHNHYTQKSLSLSP
GKSGGGSDIQMTQSPLSLPVTPGEPASISCRSSQSLLHSNGYNYLDWYLQ
KPGQSPQLLIYLGSNRASGVPDRFSGSGSGTDFTLKISRVEAEDVGVYYC
MQALQTPWTFGQGTKVEIKRTGGGGSGGGGSGGGGSGGGGSEVQLLESGG
GLVQPGGSLRLSCAASGFTFSRYVMHWVRQAPGKGLEWVSSIWPSGGMTK
YADSVKGRFTISRDNSKNTLYLQMNSLRAEDTAVYYCTRQRYRGPKYYYY
MDVWGKGTTVTVSS
>620I-X0136-E07 = DX2930 Heavy Chain +
559C-M0182-H04 L4H scFv

(SEQ ID NO: 65)

EVQLLESGGGLVQPGGSLRLSCAASGFTFSHYIMMWVRQAPGKGLEWVSG
IYSSGGITVYADSVKGRFTISRDNSKNTLYLQMNSLRAEDTAVYYCAYRR
IGVPRRDEFDIWGQGTMVTVSSASTKGPSVFPLAPSSKSTSGGTAALGCL
VKDYFPEPVTVSWNSGALTSGVHTFPAVLQSSGLYSLSSVVTVPSSSLGT
QTYICNVNHKPSNTKVDKRVEPKSCDKTHTCPPCPAPELLGGPSVFLFPP
KPKDTLMISRTPEVTCVVVDVSHEDPEVKFNWYVDGVEVHNAKTKPREEQ
YNSTYRVVSVLTVLHQDWLNGKEYKCKVSNKALPAPIEKTISKAKGQPRE
PQVYTLPPSREEMTKNQVSLTCLVKGFYPSDIAVEWESNGQPENNYKTTP
PVLDSDGSFFLYSKLTVDKSRWQQGNVFSCSVMHEALHNHYTQKSLSLSP
GKSGGGSEVQLLESGGGLVQPGGSLRLSCAASGFTFSWYIMGWVRQAPGK
GLEWVSRIYPSGGTTFYADSVKGRFTISRDNSKNTLYLQMNSLRAEDTAV
YYCTRQRYRGPKYYYYMDVWGKGTTVTVSSGGGGSGGGGSGGGGSGGGGS
DIQMTQSPLSLPVTPGEPASISCRSSQSLLHSNGYNYLDWYLQKPGQSPQ
LLIYLGSNRASGVPDRFSGSGSGTDFTLKISRVEAEDVGVYYCMQALQTP
WTFGQGTKVEIKR
>620I-X0142-B02 = DX2930 Heavy Chain +
559C-M0182-H04 H4L scFv

(SEQ ID NO: 66)

EVQLLESGGGLVQPGGSLRLSCAASGFTFSHYIMMWVRQAPGKGLEWVSG
IYSSGGITVYADSVKGRFTISRDNSKNTLYLQMNSLRAEDTAVYYCAYRR
IGVPRRDEFDIWGQGTMVTVSSASTKGPSVFPLAPSSKSTSGGTAALGCL
VKDYFPEPVTVSWNSGALTSGVHTFPAVLQSSGLYSLSSVVTVPSSSLGT
QTYICNVNHKPSNTKVDKRVEPKSCDKTHTCPPCPAPELLGGPSVFLFPP
KPKDTLMISRTPEVTCVVVDVSHEDPEVKFNWYVDGVEVHNAKTKPREEQ
YNSTYRVVSVLTVLHQDWLNGKEYKCKVSNKALPAPIEKTISKAKGQPRE
PQVYTLPPSREEMTKNQVSLTCLVKGFYPSDIAVEWESNGQPENNYKTTP
PVLDSDGSFFLYSKLTVDKSRWQQGNVFSCSVMHEALHNHYTQKSLSLSP
GKSGGGSDIQMTQSPLSLPVTPGEPASISCRSSQSLLHSNGYNYLDWYLQ
KPGQSPQLLIYLGSNRASGVPDRFSGSGSGTDFTLKISRVEAEDVGVYYC
MQALQTPWTFGQGTKVEIKRTGGGGSGGGGSGGGGSGGGGSEVQLLESGG
GLVQPGGSLRLSCAASGFTFSWYIMGWVRQAPGKGLEWVSRIYPSGGTTF
YADSVKGRFTISRDNSKNTLYLQMNSLRAEDTAVYYCTRQRYRGPKYYYY
MDVWGKGTTVTVSS
>620I-X0136-F11 = DX2930 Heavy Chain +
559C-M0183-B12 L4H scFv

(SEQ ID NO: 67)

EVQLLESGGGLVQPGGSLRLSCAASGFTFSHYIMMWVRQAPGKGLEWVSG
IYSSGGITVYADSVKGRFTISRDNSKNTLYLQMNSLRAEDTAVYYCAYRR
IGVPRRDEFDIWGQGTMVTVSSASTKGPSVFPLAPSSKSTSGGTAALGCL
VKDYFPEPVTVSWNSGALTSGVHTFPAVLQSSGLYSLSSVVTVPSSSLGT
QTYICNVNHKPSNTKVDKRVEPKSCDKTHTCPPCPAPELLGGPSVFLFPP
KPKDTLMISRTPEVTCVVVDVSHEDPEVKFNWYVDGVEVHNAKTKPREEQ
YNSTYRVVSVLTVLHQDWLNGKEYKCKVSNKALPAPIEKTISKAKGQPRE
PQVYTLPPSREEMTKNQVSLTCLVKGFYPSDIAVEWESNGQPENNYKTTP
PVLDSDGSFFLYSKLTVDKSRWQQGNVFSCSVMHEALHNHYTQKSLSLSP
GKSGGGSEVQLLESGGGLVQPGGSLRLSCAASGFTFSWYVMYWVRQAPGK
GLEWVSRIYPSGGITHYADSVKGRFTISRDNSKNTLYLQMNSLRAEDTAV
YYCTRQRYRGPKYYYYMDVWGKGTTVTVSSGGGGSGGGGSGGGGSGGGGS
DIQMTQSPLSLPVTPGEPASISCRSSQSLLHSNGYNYLDWYLQKPGQSPQ
LLIYLGSNRASGVPDRFSGSGSGTDFTLKI [symbol] GVYYCMQALQTPWTFGQGT
KVEIKR
>620I-X0142-A05 = DX2930 Heavy Chain +
559C-M0183-B12 H4L scFv

(SEQ ID NO: 68)

EVQLLESGGGLVQPGGSLRLSCAASGFTFSHYIMMWVRQAPGKGLEWVSG
IYSSGGITVYADSVKGRFTISRDNSKNTLYLQMNSLRAEDTAVYYCAYRR
IGVPRRDEFDIWGQGTMVTVSSASTKGPSVFPLAPSSKSTSGGTAALGCL
VKDYFPEPVTVSWNSGALTSGVHTFPAVLQSSGLYSLSSVVTVPSSSLGT
QTYICNVNHKPSNTKVDKRVEPKSCDKTHTCPPCPAPELLGGPSVFLFPP
KPKDTLMISRTPEVTCVVVDVSHEDPEVKFNWYVDGVEVHNAKTKPREEQ
YNSTYRVVSVLTVLHQDWLNGKEYKCKVSNKALPAPIEKTISKAKGQPRE
PQVYTLPPSREEMTKNQVSLTCLVKGFYPSDIAVEWESNGQPENNYKTTP
PVLDSDGSFFLYSKLTVDKSRWQQGNVFSCSVMHEALHNHYTQKSLSLSP
GKSGGGSDIQMTQSPLSLPVTPGEPASISCRSSQSLLHSNGYNYLDWYLQ
KPGQSPQLLIYLGSNRASGVPDRFSGSGSGTDFTLKISRVEAEDVGVYYC
MQALQTPWTFGQGTKVEIKRTGGGGSGGGGSGGGGSGGGGSEVQLLESGG
GLVQPGGSLRLSCAASGFTFSWYVMYWVRQAPGKGLEWVSRIYPSGGITH
YADSVKGRFTISRDNSKNTLYLQMNSLRAEDTAVYYCTRQRYRGPKYYYY
MDVWGKGTTVTVSS
>620I-X0136-C09 = DX2930 Heavy Chain +
559C-M0183-C03 L4H scFv

(SEQ ID NO: 69)

EVQLLESGGGLVQPGGSLRLSCAASGFTFSHYIMMWVRQAPGKGLEWVSG
IYSSGGITVYADSVKGRFTISRDNSKNTLYLQMNSLRAEDTAVYYCAYRR
IGVPRRDEFDIWGQGTMVTVSSASTKGPSVFPLAPSSKSTSGGTAALGCL
VKDYFPEPVTVSWNSGALTSGVHTFPAVLQSSGLYSLSSVVTVPSSSLGT
QTYICNVNHKPSNTKVDKRVEPKSCDKTHTCPPCPAPELLGGPSVFLFPP
KPKDTLMISRTPEVTCVVVDVSHEDPEVKFNWYVDGVEVHNAKTKPREEQ
YNSTYRVVSVLTVLHQDWLNGKEYKCKVSNKALPAPIEKTISKAKGQPRE
PQVYTLPPSREEMTKNQVSLTCLVKGFYPSDIAVEWESNGQPENNYKTTP
PVLDSDGSFFLYSKLTVDKSRWQQGNVFSCSVMHEALHNHYTQKSLSLSP
GKSGGGSEVQLLESGGGLVQPGGSLRLSCAASGFTFSWYNMHWVRQAPGK
GLEWVSYISPSGGKTKYTDSVKGRFTISRDNSKNTLYLQMNSLRAEDTAV
YYCTRQRYRGPKYYYYMDVWGKGTTVTVSSGGGGSGGGGSGGGGSGGGGS
DIQMTQSPLSLPVTPGEPASISCRSSQSLLHSNGYNYLDWYLQKPGQSPQ
LLIYLGSNRASGVPDRFSGSGSGTDFTLKISRVEAEDVGVYYCMQALQTP
WTFGQGTKVEIKR
>620I-X0138-B10 = DX2930 Heavy Chain +
559C-M0183-C03 H4L scFv

(SEQ ID NO: 70)

EVQLLESGGGLVQPGGSLRLSCAASGFTFSHYIMMWVRQAPGKGLEWVSG
IYSSGGITVYADSVKGRFTISRDNSKNTLYLQMNSLRAEDTAVYYCAYRR
IGVPRRDEFDIWGQGTMVTVSSASTKGPSVFPLAPSSKSTSGGTAALGCL
VKDYFPEPVTVSWNSGALTSGVHTFPAVLQSSGLYSLSSVVTVPSSSLGT
QTYICNVNHKPSNTKVDKRVEPKSCDKTHTCPPCPAPELLGGPSVFLFPP
KPKDTLMISRTPEVTCVVVDVSHEDPEVKFNWYVDGVEVHNAKTKPREEQ
YNSTYRVVSVLTVLHQDWLNGKEYKCKVSNKALPAPIEKTISKAKGQPRE
PQVYTLPPSREEMTKNQVSLTCLVKGFYPSDIAVEWESNGQPENNYKTTP
PVLDSDGSFFLYSKLTVDKSRWQQGNVFSCSVMHEALHNHYTQKSLSLSP
GKSGGGSDIQMTQSPLSLPVTPGEPASISCRSSQSLLHSNGYNYLDWYLQ
KPGQSPQLLIYLGSNRASGVPDRFSGSGSGTDFTLKISRVEAEDVGVYYC
MQALQTPWTFGQGTKVEIKRTGGGGSGGGGSGGGGSGGGGSEVQLLESGG
GLVQPGGSLRLSCAASGFTFSWYNMHWVRQAPGKGLEWVSYISPSGGKTK
YTDSVKGRFTISRDNSKNTLYLQMNSLRAEDTAVYYCTRQRYRGPKYYYY
MDVWGKGTTVTVSS
>620I-X0136-C08 = DX2930 Heavy Chain +
559C-M0183-D08 L4H scFv

(SEQ ID NO: 71)

EVQLLESGGGLVQPGGSLRLSCAASGFTFSHYIMMWVRQAPGKGLEWVSG
IYSSGGITVYADSVKGRFTISRDNSKNTLYLQMNSLRAEDTAVYYCAYRR
IGVPRRDEFDIWGQGTMVTVSSASTKGPSVFPLAPSSKSTSGGTAALGCL
VKDYFPEPVTVSWNSGALTSGVHTFPAVLQSSGLYSLSSVVTVPSSSLGT
QTYICNVNHKPSNTKVDKRVEPKSCDKTHTCPPCPAPELLGGPSVFLFPP
KPKDTLMISRTPEVTCVVVDVSHEDPEVKFNWYVDGVEVHNAKTKPREEQ
YNSTYRVVSVLTVLHQDWLNGKEYKCKVSNKALPAPIEKTISKAKGQPRE
PQVYTLPPSREEMTKNQVSLTCLVKGFYPSDIAVEWESNGQPENNYKTTP
PVLDSDGSFFLYSKLTVDKSRWQQGNVFSCSVMHEALHNHYTQKSLSLSP
GKSGGGSEVQLLESGGGLVQPGGSLRLSCAASGFTFSRYIMGWVRQAPGK
GLEWVSSIYPSGGVTRYADSVKGRFTISRDNSKNTLYLQMNSLRAEDTAV
YYCTRQRYRGPKYYYYMDVWGKGTTVTVSSGGGGSGGGGSGGGGSGGGGS
DIQMTQSPLSLPVTPGEPASISCRSSQSLLHSNGYNYLDWYLQKPGQSPQ
LLIYLGSNRASGVPDRFSGSGSGTDFTLKISRVEAEDVGVYYCMQALQTP
WTFGQGTKVEIKR
>620I-X0139-A11 = DX2930 Heavy Chain +
559C-M0183-D08 H4L scFv

(SEQ ID NO: 72)

EVQLLESGGGLVQPGGSLRLSCAASGFTFSHYIMMWVRQAPGKGLEWVSG
IYSSGGITVYADSVKGRFTISRDNSKNTLYLQMNSLRAEDTAVYYCAYRR
IGVPRRDEFDIWGQGTMVTVSSASTKGPSVFPLAPSSKSTSGGTAALGCL
VKDYFPEPVTVSWNSGALTSGVHTFPAVLQSSGLYSLSSVVTVPSSSLGT
QTYICNVNHKPSNTKVDKRVEPKSCDKTHTCPPCPAPELLGGPSVFLFPP
KPKDTLMISRTPEVTCVVVDVSHEDPEVKFNWYVDGVEVHNAKTKPREEQ
YNSTYRVVSVLTVLHQDWLNGKEYKCKVSNKALPAPIEKTISKAKGQPRE
PQVYTLPPSREEMTKNQVSLTCLVKGFYPSDIAVEWESNGQPENNYKTTP
PVLDSDGSFFLYSKLTVDKSRWQQGNVFSCSVMHEALHNHYTQKSLSLSP
GKSGGGSDIQMTQSPLSLPVTPGEPASISCRSSQSLLHSNGYNYLDWYLQ
KPGQSPQLLIYLGSNRASGVPDRFSGSGSGTDFTLKISRVEAEDVGVYYC
MQALQTPWTFGQGTKVEIKRTGGGGSGGGGSGGGGSGGGGSEVQLLESGG
GLVQPGGSLRLSCAASGFTFSRYIMGWVRQAPGKGLEWVSSIYPSGGVTR
YADSVKGRFTISRDNSKNTLYLQMNSLRAEDTAVYYCTRQRYRGPKYYYY
MDVWGKGTTVTVSS
>620I-X0136-D05 = DX2930 Heavy Chain +
559C-M0183-H08 L4H scFv

(SEQ ID NO: 73)

EVQLLESGGGLVQPGGSLRLSCAASGFTFSHYIMMWVRQAPGKGLEWVSG
IYSSGGITVYADSVKGRFTISRDNSKNTLYLQMNSLRAEDTAVYYCAYRR
IGVPRRDEFDIWGQGTMVTVSSASTKGPSVFPLAPSSKSTSGGTAALGCL
VKDYFPEPVTVSWNSGALTSGVHTFPAVLQSSGLYSLSSVVTVPSSSLGT
QTYICNVNHKPSNTKVDKRVEPKSCDKTHTCPPCPAPELLGGPSVFLFPP
KPKDTLMISRTPEVTCVVVDVSHEDPEVKFNWYVDGVEVHNAKTKPREEQ
YNSTYRVVSVLTVLHQDWLNGKEYKCKVSNKALPAPIEKTISKAKGQPRE
PQVYTLPPSREEMTKNQVSLTCLVKGFYPSDIAVEWESNGQPENNYKTTP
PVLDSDGSFFLYSKLTVDKSRWQQGNVFSCSVMHEALHNHYTQKSLSLSP
GKSGGGSEVQLLESGGGLVQPGGSLRLSCAASGFTFSRYIMHWVRQAPGK
GLEWVSSIYPSGGVTKYADSVKGRFTISRDNSKNTLYLQMNSLRAEDTAV
YYCTRQRYRGPKYYYYMDVWGKGTTVTVSSGGGGSGGGGSGGGGSGGGGS
DIQMTQSPLSLPVTPGEPASISCRSSQSLLHSNGYNYLDWYLQKPGQSPQ
LLIYLGSNRASGVPDRFSGSGSGTDFTLKISRVEAEDVGVYYCMQALQTP
WTFGQGTKVEIKR
>620I-X0138-D04 = DX2930 Heavy Chain +
559C-M0183-H08 H4L scFv

(SEQ ID NO: 74)

EVQLLESGGGLVQPGGSLRLSCAASGFTFSHYIMMWVRQAPGKGLEWVSG
IYSSGGITVYADSVKGRFTISRDNSKNTLYLQMNSLRAEDTAVYYCAYRR
IGVPRRDEFDIWGQGTMVTVSSASTKGPSVFPLAPSSKSTSGGTAALGCL
VKDYFPEPVTVSWNSGALTSGVHTFPAVLQSSGLYSLSSVVTVPSSSLGT
QTYICNVNHKPSNTKVDKRVEPKSCDKTHTCPPCPAPELLGGPSVFLFPP
KPKDTLMISRTPEVTCVVVDVSHEDPEVKFNWYVDGVEVHNAKTKPREEQ
YNSTYRVVSVLTVLHQDWLNGKEYKCKVSNKALPAPIEKTISKAKGQPRE
PQVYTLPPSREEMTKNQVSLTCLVKGFYPSDIAVEWESNGQPENNYKTTP
PVLDSDGSFFLYSKLTVDKSRWQQGNVFSCSVMHEALHNHYTQKSLSLSP
GKSGGGSDIQMTQSPLSLPVTPGEPASISCRSSQSLLHSNGYNYLDWYLQ
KPGQSPQLLIYLGSNRASGVPDRFSGSGSGTDFTLKISRVEAEDVGVYYC
MQALQTPWTFGQGTKVEIKRTGGGGSGGGGSGGGGSGGGGSEVQLLESGG
GLVQPGGSLRLSCAASGFTFSRYIMHWVRQAPGKGLEWVSSIYPSGGVTK
YADSVKGRFTISRDNSKNTLYLQMNSLRAEDTAVYYCTRQRYRGPKYYYY
MDVWGKGTTVTVSS
>620I-X0136-G08 = DX2930 Heavy Chain +
559C-M0184-B04 L4H scFv

(SEQ ID NO: 75)

EVQLLESGGGLVQPGGSLRLSCAASGFTFSHYIMMWVRQAPGKGLEWVSG
IYSSGGITVYADSVKGRFTISRDNSKNTLYLQMNSLRAEDTAVYYCAYRR
IGVPRRDEFDIWGQGTMVTVSSASTKGPSVFPLAPSSKSTSGGTAALGCL
VKDYFPEPVTVSWNSGALTSGVHTFPAVLQSSGLYSLSSVVTVPSSSLGT
QTYICNVNHKPSNTKVDKRVEPKSCDKTHTCPPCPAPELLGGPSVFLFPP
KPKDTLMISRTPEVTCVVVDVSHEDPEVKFNWYVDGVEVHNAKTKPREEQ
YNSTYRVVSVLTVLHQDWLNGKEYKCKVSNKALPAPIEKTISKAKGQPRE
PQVYTLPPSREEMTKNQVSLTCLVKGFYPSDIAVEWESNGQPENNYKTTP
PVLDSDGSFFLYSKLTVDKSRWQQGNVFSCSVMHEALHNHYTQKSLSLSP
GKSGGGSEVQLLESGGGLVQPGGSLRLSCAASGFTFSFYSMHWVRQAPGK
GLEWVSRIYPSGGVTKYADSVKGRFTISRDNSKNTLYLQMNSLRAEDTAV
YYCTRQRYRGPKYYYYMDVWGKGTTVTVSSGGGGSGGGGSGGGGSGGGGS
DIQMTQSPLSLPVTPGEPASISCRSSQSLLHSNGYNYLDWYLQKPGQSPQ
LLIYLGSNRASGVPDRFSGSGSGTDFTLKISRVEAEDVGVYYCMQALQTP
WTFGQGTKVEIKR
>620I-X0142-B07 = DX2930 Heavy Chain +
559C-M0184-B04 H4L scFv

(SEQ ID NO: 76)

EVQLLESGGGLVQPGGSLRLSCAASGFTFSHYIMMWVRQAPGKGLEWVSG
IYSSGGITVYADSVKGRFTISRDNSKNTLYLQMNSLRAEDTAVYYCAYRR
IGVPRRDEFDIWGQGTMVTVSSASTKGPSVFPLAPSSKSTSGGTAALGCL
VKDYFPEPVTVSWNSGALTSGVHTFPAVLQSSGLYSLSSVVTVPSSSLGT
QTYICNVNHKPSNTKVDKRVEPKSCDKTHTCPPCPAPELLGGPSVFLFPP
KPKDTLMISRTPEVTCVVVDVSHEDPEVKFNWYVDGVEVHNAKTKPREEQ
YNSTYRVVSVLTVLHQDWLNGKEYKCKVSNKALPAPIEKTISKAKGQPRE
PQVYTLPPSREEMTKNQVSLTCLVKGFYPSDIAVEWESNGQPENNYKTTP
PVLDSDGSFFLYSKLTVDKSRWQQGNVFSCSVMHEALHNHYTQKSLSLSP
GKSGGGSDIQMTQSPLSLPVTPGEPASISCRSSQSLLHSNGYNYLDWYLQ
KPGQSPQLLIYLGSNRASGVPDRFSGSGSGTDFTLKISRVEAEDVGVYYC
MQALQTPWTFGQGTKVEIKRTGGGGSGGGGSGGGGSGGGGSEVQLLESGG
GLVQPGGSLRLSCAASGFTFSFYSMHWVRQAPGKGLEWVSRIYPSGGVTK
YADSVKGRFTISRDNSKNTLYLQMNSLRAEDTAVYYCTRQRYRGPKYYYY
MDVWGKGTTVTVSS
>620I-X0142-A11 = DX2930 Heavy Chain +
559C-M0184-D01 L4H scFv

(SEQ ID NO: 77)

EVQLLESGGGLVQPGGSLRLSCAASGFTFSHYIMMWVRQAPGKGLEWVSG
IYSSGGITVYADSVKGRFTISRDNSKNTLYLQMNSLRAEDTAVYYCAYRR
IGVPRRDEFDIWGQGTMVTVSSASTKGPSVFPLAPSSKSTSGGTAALGCL
VKDYFPEPVTVSWNSGALTSGVHTFPAVLQSSGLYSLSSVVTVPSSSLGT
QTYICNVNHKPSNTKVDKRVEPKSCDKTHTCPPCPAPELLGGPSVFLFPP
KPKDTLMISRTPEVTCVVVDVSHEDPEVKFNWYVDGVEVHNAKTKPREEQ
YNSTYRVVSVLTVLHQDWLNGKEYKCKVSNKALPAPIEKTISKAKGQPRE
PQVYTLPPSREEMTKNQVSLTCLVKGFYPSDIAVEWESNGQPENNYKTTP
PVLDSDGSFFLYSKLTVDKSRWQQGNVFSCSVMHEALHNHYTQKSLSLSP
GKSGGGSEVQLLESGGGLVQPGGSLRLSCAASGFTFSFYVMGWVRQAPGK
GLEWVSRIYPSGGLTQYADSVKGRFTISRDNSKNTLYLQMNSLRAEDTAV
YYCTRQRYRGPKYYYYMDVWGKGTTVTVSSGGGGSGGGGSGGGGSGGGGS
DIQMTQSPLSLPVTPGEPASISCRSSQSLLHSNGYNYLDWYLQKPGQSPQ
LLIYLGSNRASGVPDRFSGSGSGTDFTLKISRVEAEDVGVYYCMQALQTP
WTFGQGTKVEIKR
>620I-X0138-G12 = DX2930 Heavy Chain +
559C-M0184-D01 H4L scFv

(SEQ ID NO: 78)

EVQLLESGGGLVQPGGSLRLSCAASGFTFSHYIMMWVRQAPGKGLEWVSG
IYSSGGITVYADSVKGRFTISRDNSKNTLYLQMNSLRAEDTAVYYCAYRR
IGVPRRDEFDIWGQGTMVTVSSASTKGPSVFPLAPSSKSTSGGTAALGCL
VKDYFPEPVTVSWNSGALTSGVHTFPAVLQSSGLYSLSSVVTVPSSSLGT
QTYICNVNHKPSNTKVDKRVEPKSCDKTHTCPPCPAPELLGGPSVFLFPP
KPKDTLMISRTPEVTCVVVDVSHEDPEVKFNWYVDGVEVHNAKTKPREEQ
YNSTYRVVSVLTVLHQDWLNGKEYKCKVSNKALPAPIEKTISKAKGQPRE
PQVYTLPPSREEMTKNQVSLTCLVKGFYPSDIAVEWESNGQPENNYKTTP
PVLDSDGSFFLYSKLTVDKSRWQQGNVFSCSVMHEALHNHYTQKSLSLSP
GKSGGGSDIQMTQSPLSLPVTPGEPASISCRSSQSLLHSNGYNYLDWYLQ
KPGQSPQLLIYLGSNRASGVPDRFSGSGSGTDFTLKISRVEAEDVGVYYC
MQALQTPWTFGQGTKVEIKRTGGGGSGGGGSGGGGSGGGGSEVQLLESGG
GLVQPGGSLRLSCAASGFTFSFYVMGWVRQAPGKGLEWVSRIYPSGGLTQ
YADSVKGRFTISRDNSKNTLYLQMNSLRAEDTAVYYCTRQRYRGPKYYYY
MDVWGKGTTVTVSS
>620I-X0142-A10 = DX2930 Heavy Chain +
559C-M0184-E06 L4H scFv

(SEQ ID NO: 79)

EVQLLESGGGLVQPGGSLRLSCAASGFTFSHYIMMWVRQAPGKGLEWVSG
IYSSGGITVYADSVKGRFTISRDNSKNTLYLQMNSLRAEDTAVYYCAYRR
IGVPRRDEFDIWGQGTMVTVSSASTKGPSVFPLAPSSKSTSGGTAALGCL
VKDYFPEPVTVSWNSGALTSGVHTFPAVLQSSGLYSLSSVVTVPSSSLGT
QTYI [symbol] NTKVDKRVEPKSCDKTHTCPPCPAPELLGGPSVFLFPPKPKDTL
MISRTPEVTCVVVDVSHEDPEVKFNWYVDGVEVHNAKTKPREEQYNSTYR
VVSVLTVLHQDWLNGKEYKCKVSNKALPAPIEKTISKAKGQPREPQVYTL
PPSREEMTKNQVSLTCLVKGFYPSDIAVEWESNGQPENNYKTTPPVLDSD
GSFFLYSKLTVDKSRWQQGNVFSCSVMHEALHNHYTQKSLSLSPGKSGGG
SEVQLLESGGGLVQPGGSLRLSCAASGFTFSWYVMQWVRQAPGKGLEWVS
SIWPSGGKTVYADSVKGRFTISRDNSKNTLYLQMNSLRAEDTAVYYCTRQ
RYRGPKYYYYMDVWGKGTTVTVSSGGGGSGGGGSGGGGSGGGGSDIQMTQ
SPLSLPVTPGEPASISCRSSQSLLHSNGYNYLDWYLQKPGQSPQLLIYLG
SNRASGVPDRFSGSGSGTDFTLKISRVEAEDVGVYYCMQALQTPWTFGQG
TKVEIKR
>620I-X0138-D03 = DX2930 Heavy Chain +
559C-M0184-E06 H4L scFv

(SEQ ID NO: 80)

EVQLLESGGGLVQPGGSLRLSCAASGFTFSHYIMMWVRQAPGKGLEWVSG
IYSSGGITVYADSVKGRFTISRDNSKNTLYLQMNSLRAEDTAVYYCAYRR
IGVPRRDEFDIWGQGTMVTVSSASTKGPSVFPLAPSSKSTSGGTAALGCL
VKDYFPEPVTVSWNSGALTSGVHTFPAVLQSSGLYSLSSVVTVPSSSLGT
QTYICNVNHKPSNTKVDKRVEPKSCDKTHTCPPCPAPELLGGPSVFLFPP
KPKDTLMISRTPEVTCVVVDVSHEDPEVKFNWYVDGVEVHNAKTKPREEQ
YNSTYRVVSVLTVLHQDWLNGKEYKCKVSNKALPAPIEKTISKAKGQPRE
PQVYTLPPSREEMTKNQVSLTCLVKGFYPSDIAVEWESNGQPENNYKTTP
PVLDSDGSFFLYSKLTVDKSRWQQGNVFSCSVMHEALHNHYTQKSLSLSP
GKSGGGSDIQMTQSPLSLPVTPGEPASISCRSSQSLLHSNGYNYLDWYLQ
KPGQSPQLLIYLGSNRASGVPDRFSGSGSGTDFTLKISRVEAEDVGVYYC
MQALQTPWTFGQGTKVEIKRTGGGGSGGGGSGGGGSGGGGSEVQLLESGG
GLVQPGGSLRLSCAASGFTFSWYVMQWVRQAPGKGLEWVSSIWPSGGKTV
YADSVKGRFTISRDNSKNTLYLQMNSLRAEDTAVYYCTRQRYRGPKYYYY
MDVWGKGTTVTVSS
>620I-X0137-C08 = DX2930 Heavy Chain +
559C-M0184-F12 L4H scFv

(SEQ ID NO: 81)

EVQLLESGGGLVQPGGSLRLSCAASGFTFSHYIMMWVRQAPGKGLEWVSG
IYSSGGITVYADSVKGRFTISRDNSKNTLYLQMNSLRAEDTAVYYCAYRR
IGVPRRDEFDIWGQGTMVTVSSASTKGPSVFPLAPSSKSTSGGTAALGCL
VKDYFPEPVTVSWNSGALTSGVHTFPAVLQSSGLYSLSSVVTVPSSSLGT
QTYICNVNHKPSNTKVDKRVEPKSCDKTHTCPPCPAPELLGGPSVFLFPP
KPKDTLMISRTPEVTCVVVDVSHEDPEVKFNWYVDGVEVHNAKTKPREEQ
YNSTYRVVSVLTVLHQDWLNGKEYKCKVSNKALPAPIEKTISKAKGQPRE
PQVYTLPPSREEMTKNQVSLTCLVKGFYPSDIAVEWESNGQPENNYKTTP
PVLDSDGSFFLYSKLTVDKSRWQQGNVFSCSVMHEALHNHYTQKSLSLSP
GKSGGGSEVQLLESGGGLVQPGGSLRLSCAASGFTFSWYVMHWVRQAPGK
GLEWVSGIWPSGGRTKYADSVKGRFTISRDNSKNTLYLQMNSLRAEDTAV
YYCTRQRYRGPKYYYYMDVWGKGTTVTVSSGGGGSGGGGSGGGGSGGGGS
DIQMTQSPLSLPVTPGEPASISCRSSQSLLHSNGYNYLDWYLQKPGQSPQ
LLIYLGSNRASGVPDRFSGSGSGTDFTLKISRVEAEDVGVYYCMQALQTP
WTFGQGTKVEIKR
>620I-X0142-E02 = DX2930 Heavy Chain +
559C-M0184-F12 H4L scFv

(SEQ ID NO: 82)

EVQLLESGGGLVQPGGSLRLSCAASGFTFSHYIMMWVRQAPGKGLEWVSG
IYSSGGITVYADSVKGRFTISRDNSKNTLYLQMNSLRAEDTAVYYCAYRR
IGVPRRDEFDIWGQGTMVTVSSASTKGPSVFPLAPSSKSTSGGTAALGCL
VKDYFPEPVTVSWNSGALTSGVHTFPAVLQSSGLYSLSSVVTVPSSSLGT
QTYICNVNHKPSNTKVDKRVEPKSCDKTHTCPPCPAPELLGGPSVFLFPP
KPKDTLMISRTPEVTCVVVDVSHEDPEVKFNWYVDGVEVHNAKTKPREEQ
YNSTYRVVSVLTVLHQDWLNGKEYKCKVSNKALPAPIEKTISKAKGQPRE
PQVYTLPPSREEMTKNQVSLTCLVKGFYPSDIAVEWESNGQPENNYKTTP
PVLDSDGSFFLYSKLTVDKSRWQQGNVFSCSVMHEALHNHYTQKSLSLSP
GKSGGGSDIQMTQSPLSLPVTPGEPASISCRSSQSLLHSNGYNYLDWYLQ
KPGQSPQLLIYLGSNRASGVPDRFSGSGSGTDFTLKISRVEAEDVGVYYC
MQALQTPWTFGQGTKVEIKRTGGGGSGGGGSGGGGSGGGGSEVQLLESGG
GLVQPGGSLRLSCAASGFTFSWYVMHWVRQAPGKGLEWVSGIWPSGGRTK
YADSVKGRFTISRDNSKNTLYLQMNSLRAEDTAVYYCTRQRYRGPKYYYY
MDVWGKGTTVTVSS
>620I-X0136-E05 = DX2930 Heavy Chain +
559C-M0191-A03 L4H scFv

(SEQ ID NO: 83)

EVQLLESGGGLVQPGGSLRLSCAASGFTFSHYIMMWVRQAPGKGLEWVSG
IYSSGGITVYADSVKGRFTISRDNSKNTLYLQMNSLRAEDTAVYYCAYRR
IGVPRRDEFDIWGQGTMVTVSSASTKGPSVFPLAPS [symbol] AALGCLVKDYFP
EPVTVSWNSGALTSGVHTFPAVLQSSGLYSLSSVVTVPSSSLGTQTYICN
VNHKPSNTKVDKRVEPKSCDKTHTCPPCPAPELLGGPSVFLFPPKPKDTL
MISRTPEVTCVVVDVSHEDPEVKFNWYVDGVEVHNAKTKPREEQYNSTYR
VVSVLTVLHQDWLNGKEYKCKVSNKALPAPIEKTISKAKGQPREPQVYTL
PPSREEMTKNQVSLTCLVKGFYPSDIAVEWESNGQPENNYKTTPPVLDSD
GSFFLYSKLTVDKSRWQQGNVFSCSVMHEALHNHYTQKSLSLSPGKSGGG
SEVQLLESGGGLVQPGGSLRLSCAASGFTFSQYIMHWVRQAPGKGLEWVS
SIYPSGGNTKYADSVKGRFTISRDNSKNTLYLQMNSLRAEDTAVYYCTRQ
RYRGPKYYYYMDVWGKGTTVTVSSGGGGSGGGGSGGGGSGGGGSDIQMTQ
SPLSLPVTPGEPASISCRSSQSLLHSNGYNYLDWYLQKPGQSPQLLIYLG
SNRASGVPDRFSGSGSGTDFTLKISRVEAEDVGVYYCMQALQTPWTFGQG
TKVEIKR
>620I-X0138-B06 = DX2930 Heavy Chain +
559C-M0191-A03 H4L scFv

(SEQ ID NO: 84)

EVQLLESGGGLVQPGGSLRLSCAASGFTFSHYIMMWVRQAPGKGLEWVSG
IYSSGGITVYADSVKGRFTISRDNSKNTLYLQMNSLRAEDTAVYYCAYRR
IGVPRRDEFDIWGQGTMVTVSSASTKGPSVFPLAPSSKSTSGGTAALGCL
VKDYFPEPVTVSWNSGALTSGVHTFPAVLQSSGLYSLSSVVTVPSSSLGT
QTYICNVNHKPSNTKVDKRVEPKSCDKTHTCPPCPAPELLGGPSVFLFPP
KPKDTLMISRTPEVTCVVVDVSHEDPEVKFNWYVDGVEVHNAKTKPREEQ
YNSTYRVVSVLTVLHQDWLNGKEYKCKVSNKALPAPIEKTISKAKGQPRE
PQVYTLPPSREEMTKNQVSLTCLVKGFYPSDIAVEWESNGQPENNYKTTP
PVLDSDGSFFLYSKLTVDKSRWQQGNVFSCSVMHEALHNHYTQKSLSLSP
GKSGGGSDIQMTQSPLSLPVTPGEPASISCRSSQSLLHSNGYNYLDWYLQ
KPGQSPQLLIYLGSNRASGVPDRFSGSGSGTDFTLKISRVEAEDVGVYYC
MQALQTPWTFGQGTKVEIKRTGGGGSGGGGSGGGGSGGGGSEVQLLESGG
GLVQPGGSLRLSCAASGFTFSQYIMHWVRQAPGKGLEWVSSIYPSGGNTK
YADSVKGRFTISRDNSKNTLYLQMNSLRAEDTAVYYCTRQRYRGPKYYYY
MDVWGKGTTVTVSS
>620I-X0136-A09 = DX2930 Heavy Chain +
559C-M0191-B11 H4L scFv

(SEQ ID NO: 85)

EVQLLESGGGLVQPGGSLRLSCAASGFTFSHYIMMWVRQAPGKGLEWVSG
IYSSGGITVYADSVKGRFTISRDNSKNTLYLQMNSLRAEDTAVYYCAYRR
IGVPRRDEFDIWGQGTMVTVSSASTKGPSVFPLAPSSKSTSGGTAALGCL
VKDYFPEPVTVSWNSGALTSGVHTFPAVLQSSGLYSLSSVVTVPSSSLGT
QTYICNVNHKPSNTKVDKRVEPKSCDKTHTCPPCPAPELLGGPSVFLFPP
KPKDTLMISRTPEVTCVVVDVSHEDPEVKFNWYVDGVEVHNAKTKPREEQ
YNSTYRVVSVLTVLHQDWLNGKEYKCKVSNKALPAPIEKTISKAKGQPRE
PQVYTLPPSREEMTKNQVSLTCLVKGFYPSDIAVEWESNGQPENNYKTTP
PVLDSDGSFFLYSKLTVDKSRWQQGNVFSCSVMHEALHNHYTQKSLSLSP
GKSGGGSEVQLLESGGGLVQPGGSLRLSCAASGFTFS
>620I-X0138-A06 = DX2930 Heavy Chain +
559C-M0191-B11 H4L scFv

(SEQ ID NO: 86)

EVQLLESGGGLVQPGGSLRLSCAASGFTFSHYIMMWVRQAPGKGLEWVSG
IYSSGGITVYADSVKGRFTISRDNSKNTLYLQMNSLRAEDTAVYYCAYRR
IGVPRRDEFDIWGQGTMVTVSSASTKGPSVFPLAPSSKSTSGGTAALGCL
VKDYFPEPVTVSWNSGALTSGVHTFPAVLQSSGLYSLSSVVTVPSSSLGT
QTYICNVNHKPSNTKVDKRVEPKSCDKTHTCPPCPAPELLGGPSVFLFPP
KPKDTLMISRTPEVTCVVVDVSHEDPEVKFNWYVDGVEVHNAKTKPREEQ
YNSTYRVVSVLTVLHQDWLNGKEYKCKVSNKALPAPIEKTISKAKGQPRE
PQVYTLPPSREEMTKNQVSLTCLVKGFYPSDIAVEWESNGQPENNYKTTP
PVLDSDGSFFLYSKLTVDKSRWQQGNVFSCSVMHEALHNHYTQKSLSLSP
GKSGGGSDIQMTQSPLSLPVTPGEPASISCRSSQSLLHSNGYNYLDWYLQ
KPGQSPQLLIYLGSNRASGVPDRFSGSGSGTDFTLKISRVEAEDVGVYYC
MQALQTPWTFGQGTKVEIKRTGGGGSGGGGSGGGGSGGGGSEVQLLESGG
GLVQPGGSLRLSCAASGFTFS
>620I-X0137-A10 = DX2930 Heavy Chain +
559C-M0191-C09 L4H scFv

(SEQ ID NO: 87)

EVQLLESGGGLVQPGGSLRLSCAASGFTFSHYIMMWVRQAPGKGLEWVSG
IYSSGGITVYADSVKGRFTISRDNSKNTLYLQMNSLRAEDTAVYYCAYRR
IGVPRRDEFDIWGQGTMVTVSSASTKGPSVFPLAPSSKSTSGGTAALGCL
VKDYFPEPVTVSWNSGALTSGVHTFPAVLQSSGLYSLSSVVTVPSSSLGT
QTYICNVNHKPSNTKVDKRVEPKSCDKTHTCPPCPAPELLGGPSVFLFPP
KPKDTLMISRTPEVTCVVVDVSHEDPEVKFNWYVDGVEVHNAKTKPREEQ
YNSTYRVVSVLTVLHQDWLNGKEYKCKVSNKALPAPIEKTISKAKGQPRE
PQVYTLPPSREEMTKNQVSLTCLVKGFYPSDIAVEWESNGQPENNYKTTP
PVLDSDGSFFLYSKLTVDKSRWQQGNVFSCSVMHEALHNHYTQKSLSLSP
GKSGGGSEVQLLESGGGLVQPGGSLRLSCAASGFTFSPYIMHWVRQAPGK
GLEWVSRIYPSGGATVYADSVKGRFTISRDNSKNTLYLQMNSLRAEDTAV
YYCTRQRYRGPKYYYYMDVWGKGTTVTVSSGGGGSGGGGSGGGGSGGGGS
DIQMTQSPLSLPVTPGEPASISCRSSQSLLHSNGYNYLDWYLQKPGQSPQ
LLIYLGSNRASGVPDRFSGSGSGTDFTLKISRVEAEDVGVYYCMQALQTP
WTFGQGTKVEIKR
>620I-X0139-B10 = DX2930 Heavy Chain +
559C-M0191-C09 H4L scFv

(SEQ ID NO: 88)

EVQLLESGGGLVQPGGSLRLSCAASGFTFSHYIMMWVRQAPGKGLEWVSG
IYSSGGITVYADSVKGRFTISRDNSKNTLYLQMNSLRAEDTAVYYCAYRR
IGVPRRDEFDIWGQGTMVTVSSASTKGPSVFPLAPSSKSTSGGTAALGCL
VKDYFPEPVTVSWNSGALTSGVHTFPAVLQSSGLYSLSSVVTVPSSSLGT
QTYICNVNHKPSNTKVDKRVEPKSCDKTHTCPPCPAPELLGGPSVFLFPP
KPKDTLMISRTPEVTCVVVDVSHEDPEVKFNWYVDGVEVHNAKTKPREEQ
YNSTYRVVSVLTVLHQDWLNGKEYKCKVSNKALPAPIEKTISKAKGQPRE
PQVYTLPPSREEMTKNQVSLTCLVKGFYPSDIAVEWESNGQPENNYKTTP
PVLDSDGSFFLYSKLTVDKSRWQQGNVFSCSVMHEALHNHYTQKSLSLSP
GKSGGGSDIQMTQSPLSLPVTPGEPASISCRSSQSLLHSNGYNYLDWYLQ
KPGQSPQLLIYLGSNRASGVPDRFSGSGSGTDFTLKISRVEAEDVGVYYC
MQALQTPWTFGQGTKVEIKRTGGGGSGGGGSGGGGSGGGGSEVQLLESGG
GLVQPGGSLRLSCAASGFTFSPYIMHWVRQAPGKGLEWVSRIYPSGGATV
YADSVKGRFTISRDNSKNTLYLQMNSLRAEDTAVYYCTRQRYRGPKYYYY
MDVWGKGTTVTVSS
>620I-X0136-A04 = DX2930 Heavy Chain +
559C-M0191-E04 L4H scFv

(SEQ ID NO: 89)

EVQLLESGGGLVQPGGSLRLSCAASGFTFSHYIMMWVRQAPGKGLEWVSG
IYSSGGITVYADSVKGRFTISRDNSKNTLYLQMNSLRAEDTAVYYCAYRR
IGVPRRDEFDIWGQGTMVTVSSASTKGPSVFPLAPSSKSTSGGTAALGCL
VKDYFPEPVTVSWNSGALTSGVHTFPAVLQSSGLYSLSSVVTVPSSSLGT
QTYICNVNHKPSNTKVDKRVEPKSCDKTHTCPPCPAPELLGGPSVFLFPP
KPKDTLMISRTPEVTCVVVDVSHEDPEVKFNWYVDGVEVHNAKTKPREEQ
YNSTYRVVSVLTVLHQDWLNGKEYKCKVSNKALPAPIEKTISKAKGQPRE
PQVYTLPPSREEMTKNQVSLTCLVKGFYPSDIAVEWESNGQPENNYKTTP
PVLDSDGSFFLYSKLTVDKSRWQQGNVFSCSVMHEALHNHYTQKSLSLSP
GKSGGGSEVQLLESGGGLVQPGGSLRLSCAASGFTFSMYIMHWVRQAPGK
GLEWVSSIYPSGGMTKYADSVKGRFTISRDNSKNTLYLQMNSLRAEDTAV
YYCTRQRYRGPKYYYYMDVWGKGTTVTVSSGGGGSGGGGSGGGGSGGGGS
DIQMTQSPLSLPVTPGEPASISCRSSQSLLHSNGYNYLDWYLQKPGQSPQ
LLIYLGSNRASGVPDRFSGSGSGTDFTLKISRVEAEDVGVYYCMQALQTP
WTFGQGTKVEIKR
>620I-X0138-D06 = DX2930 Heavy Chain +
559C-M0191-E04 H4L scFv

(SEQ ID NO: 90)

EVQLLESGGGLVQPGGSLRLSCAASGFTFSHYIMMWVRQAPGKGLEWVSG
IYSSGGITVYADSVKGRFTISRDNSKNTLYLQMNSLRAEDTAVYYCAYRR
IGVPRRDEFDIWGQGTMVTVSSASTKGPSVFPLAPSSKSTSGGTAALGCL
VKDYFPEPVTVSWNSGALTSGVHTFPAVLQSSGLYSLSSVVTVPSSSLGT
QTYICNVNHKPSNTKVDKRVEPKSCDKTHTCPPCPAPELLGGPSVFLFPP
KPKDTLMISRTPEVTCVVVDVSHEDPEVKFNWYVDGVEVHNAKTKPREEQ
YNSTYRVVSVLTVLHQDWLNGKEYKCKVSNKALPAPIEKTISKAKGQPRE
PQVYTLPPSREEMTKNQVSLTCLVKGFYPSDIAVEWESNGQPENNYKTTP
PVLDSDGSFFLYSKLTVDKSRWQQGNVFSCSVMHEALHNHYTQKSLSLSP
GKSGGGSDIQMTQSPLSLPVTPGEPASISCRSSQSLLHSNGYNYLDWYLQ
KPGQSPQLLIYLGSNRASGVPDRFSGSGSGTDFTLKISRVEAEDVGVYYC
MQALQTPWTFGQGTKVEIKRTGGGGSGGGGSGGGGSGGGGSEVQLLESGG
GLVQPGGSLRLSCAASGFTFSMYIMHWVRQAPGKGLEWVSSIYPSGGMTK
YADSVKGRFTISRDNSKNTLYLQMNSLRAEDTAVYYCTRQRYRGPKYYYY
MDVWGKGTTVTVSS
>620I-X0136-C11 = DX2930 Heavy Chain +
559C-M0191-E09 L4H scFv

(SEQ ID NO: 91)

EVQLLESGGGLVQPGGSLRLSCAASGFTFSHYIMMWVRQAPGKGLEWVSG
IYSSGGITVYADSVKGRFTISRDNSKNTLYLQMNSLRAEDTAVYYCAYRR
IGVPRRDEFDIWGQGTMVTVSSASTKGPSVFPLAPSSKSTSGGTAALGCL
VKDYFPEPVTVSWNSGALTSGVHTFPAVLQSSGLYSLSSVVTVPSSSLGT
QTYICNVNHKPSNTKVDKRVEPKSCDKTHTCPPCPAPELLGGPSVFLFPP
KPKDTLMISRTPEVTCVVVDVSHEDPEVKFNWYVDGVEVHNAKTKPREEQ
YNSTYRVVSVLTVLHQDWLNGKEYKCKVSNKALPAPIEKT [symbol] REPQVYTL
PPSREEMTKNQVSLTCLVKGFYPSDIAVEWESNGQPENNYKTTPPVLDSD
GSFFLYSKLTVDKSRWQQGNVFSCSVMHEALHNHYTQKSLSLSPGKSGGG
SEVQLLESGGGLVQPGGSLRLSCAASGFTFSWYSMHWVRQAPGKGLEWVS
VIYPSGGKTRYADSVKGRFTISRDNSKNTLYLQMNSLRAEDTAVYYCTRQ
RYRGPKYYYYMDVWGKGTTVTVSSGGGGSGGGGSGGGGSGGGGSDIQMTQ
SPLSLPVTPGEPASISCRSSQSLLHSNGYNYLDWYLQKPGQSPQLLIYLG
SNRASGVPDRFSGSGSGTDFTLKISRVEAEDVGVYYCMQALQTPWTFGQG
TKVEIKR
>620I-X0138-B07 = DX2930 Heavy Chain +
559C-M0191-E09 H4L scFv

(SEQ ID NO: 92)

EVQLLESGGGLVQPGGSLRLSCAASGFTFSHYIMMWVRQAPGKGLEWVSG
IYSSGGITVYADSVKGRFTISRDNSKNTLYLQMNSLRAEDTAVYYCAYRR
IGVPRRDEFDIWGQGTMVTVSSASTKGPSVFPLAPSSKSTSGGTAALGCL
VKDYFPEPVTVSWNSGALTSGVHTFPAVLQSSGLYSLSSVVTVPSSSLGT
QTYICNVNHKPSNTKVDKRVEPKSCDKTHTCPPCPAPELLGGPSVFLFPP
KPKDTLMISRTPEVTCVVVDVSHEDPEVKFNWYVDGVEVHNAKTKPREEQ
YNSTYRVVSVLTVLHQDWLNGKEYKCKVSNKALPAPIEKTISKAKGQPRE
PQVYTLPPSREEMTKNQVSLTCLVKGFYPSDIAVEWESNGQPENNYKTTP
PVLDSDGSFFLYSKLTVDKSRWQQGNVFSCSVMHEALHNHYTQKSLSLSP
GKSGGGSDIQMTQSPLSLPVTPGEPASISCRSSQSLLHSNGYNYLDWYLQ
KPGQSPQLLIYLGSNRASGVPDRFSGSGSGTDFTLKISRVEAEDVGVYYC
MQALQTPWTFGQGTKVEIKRTGGGGSGGGGSGGGGSGGGGSEVQLLESGG
GLVQPGGSLRLSCAASGFTFSWYSMHWVRQAPGKGLEWVSVIYPSGGKTR
YADSVKGRFTISRDNSKNTLYLQMNSLRAEDTAVYYCTRQRYRGPKYYYY
MDVWGKGTTVTVSS
>620I-X0136-A02 = DX2930 Heavy Chain +
559C-M0191-H09 L4H scFv

(SEQ ID NO: 93)

EVQLLESGGGLVQPGGSLRLSCAASGFTFSHYIMMWVRQAPGKGLEWVSG
IYSSGGITVYADSVKGRFTISRDNSKNTLYLQMNSLRAEDTAVYYCAYRR
IGVPRRDEFDIWGQGTMVTVSSASTKGPSVFPLAPSSKSTSGGTAALGCL
VKDYFPEPVTVSWNSGALTSGVHTFPAVLQSSGLYSLSSVVTVPSSSLGT
QTYICNVNHKPSNTKVDKRVEPKSCDKTHTCPPCPAPELLGGPSVFLFPP
KPKDTLMISRTPEVTCVVVDVSHEDPEVKFNWYVDGVEVHNAKTKPREEQ
YNSTYRVVSVLTVLHQDWLNGKEYKCKVSNKALPAPIEKTISKAKGQPRE
PQVYTLPPSREEMTKNQVSLTCLVKGFYPSDIAVEWESNGQPENNYKTTP
PVLDSDGSFFLYSKLTVDKSRWQQGNVFSCSVMHEALHNHYTQKSLSLSP
GKSGGGSEVQLLESGGGLVQPGGSLRLSCAASGFTFSMYVMHWVRQAPGK
GLEWVSSIYPSGGLTKYADSVKGRFTISRDNSKNTLYLQMNSLRAEDTAV
YYCTRQRYRGPKYYYYMDVWGKGTTVTVSSGGGGSGGGGSGGGGSGGGGS
DIQMTQSPLSLPVTPGEPASISCRSSQSLLHSNGYNYLDWYLQKPGQSPQ
LLIYLGSNRASGVPDRFSGSGSGTDFTLKISRVEAEDVGVYYCMQALQTP
WTFGQGTKVEIKR
>620I-X0139-G02 = DX2930 Heavy Chain +
559C-M0191-H09 H4L scFv

(SEQ ID NO: 94)

EVQLLESGGGLVQPGGSLRLSCAASGFTFSHYIMMWVRQAPGKGLEWVSG
IYSSGGITVYADSVKGRFTISRDNSKNTLYLQMNSLRAEDTAVYYCAYRR
IGVPRRDEFDIWGQGTMVTVSSASTKGPSVFPLAPSSKSTSGGTAALGCL
VKDYFPEPVTVSWNSGALTSGVHTFPAVLQSSGLYSLSSVVTVPSSSLGT
QTYICNVNHKPSNTKVDKRVEPKSCDKTHTCPPCPAPELLGGPSVFLFPP
KPKDTLMISRTPEVTCVVVDVSHEDPEVKFNWYVDGVEVHNAKTKPREEQ
YNSTYRVVSVLTVLHQDWLNGKEYKCKVSNKALPAPIEKTISKAKGQPRE
PQVYTLPPSREEMTKNQVSLTCLVKGFYPSDIAVEWESNGQPENNYKTTP
PVLDSDGSFFLYSKLTVDKSRWQQGNVFSCSVMHEALHNHYTQKSLSLSP
GKSGGGSDIQMTQSPLSLPVTPGEPASISCRSSQSLLHSNGYNYLDWYLQ
KPGQSPQLLIYLGSNRASGVPDRFSGSGSGTDFTLKISRVEAEDVGVYYC
MQALQTPWTFGQGTKVEIKRTGGGGSGGGGSGGGGSGGGGSEVQLLESGG
GLVQPGGSLRLSCAASGFTFSMYVMHWVRQAPGKGLEWVSSIYPSGGLTK
YADSVKGRFTISRDNSKNTLYLQMNSLRAEDTAVYYCTRQRYRGPKYYYY
MDVWGKGTTVTVSS
>620I-X0136-B07 = DX2930 Heavy Chain +
559C-M0191-H10 L4H scFv

(SEQ ID NO: 95)

EVQLLESGGGLVQPGGSLRLSCAASGFTFSHYIMMWVRQAPGKGLEWVSG
IYSSGGITVYADSVKGRFTISRDNSKNTLYLQMNSLRAEDTAVYYCAYRR
IGVPRRDEFDIWGQGTMVTVSSASTKGPSVFPLAPSSKSTSGGTAALGCL
VKDYFPEPVTVSWNSGALTSGVHTFPAVLQSSGLYSLSSVVTVPSSSLGT
QTYICNVNHKPSNTKVDKRVEPKSCDKTHTCPPCPAPELLGGPSVFLFPP
KPKDTLMISRTPEVTCVVVDVS [symbol] NWYVDGVEVHNAKTKPREEQYNSTYR
VVSVLTVLHQDWLNGKEYKCKVSNKALPAPIEKTISKAKGQPREPQVYTL
PPSREEMTKNQVSLTCLVKGFYPSDIAVEWESNGQPENNYKTTPPVLDSD
GSFFLYSKLTVDKSRWQQGNVFSCSVMHEALHNHYTQKSLSLSPGKSGGG
SEVQLLESGGGLVQPGGSLRLSCAASGFTFSWYTMHWVRQAPGKGLEWVS
SIYPSGGFTRYADSVKGRFTISRDNSKNTLYLQMNSLRAEDTAVYYCTRQ
RYRGPKYYYYMDVWGKGTTVTVSSGGGGSGGGGSGGGGSGGGGSDIQMTQ
SPLSLPVTPGEPASISCRSSQSLLHSNGYNYLDWYLQKPGQSPQLLIYLG
SNRASGVPDRFSGSGSGTDFTLKISRVEAEDVGVYYCMQALQTPWTFGQG
TKVEIKR
>620I-X0138-E03 = DX2930 Heavy Chain +
559C-M0191-H10 H4L scFv

(SEQ ID NO: 96)

EVQLLESGGGLVQPGGSLRLSCAASGFTFSHYIMMWVRQAPGKGLEWVSG
IYSSGGITVYADSVKGRFTISRDNSKNTLYLQMNSLRAEDTAVYYCAYRR
IGVPRRDEFDIWGQGTMVTVSSASTKGPSVFPLAPSSKSTSGGTAALGCL
VKDYFPEPVTVSWNSGALTSGVHTFPAVLQSSGLYSLSSVVTVPSSSLGT
QTYICNVNHKPSNTKVDKRVEPKSCDKTHTCPPCPAPELLGGPSVFLFPP
KPKDTLMISRTPEVTCVVVDVSHEDPEVKFNWYVDGVEVHNAKTKPREEQ
YNSTYRVVSVLTVLHQDWLNGKEYKCKVSNKALPAPIEKTISKAKGQPRE
PQVYTLPPSREEMTKNQVSLTCLVKGFYPSDIAVEWESNGQPENNYKTTP
PVLDSDGSFFLYSKLTVDKSRWQQGNVFSCSVMHEALHNHYTQKSLSLSP
GKSGGGSDIQMTQSPLSLPVTPGEPASISCRSSQSLLHSNGYNYLDWYLQ
KPGQSPQLLIYLGSNRASGVPDRFSGSGSGTDFTLKISRVEAEDVGVYYC
MQALQTPWTFGQGTKVEIKRTGGGGSGGGGSGGGGSGGGGSEVQLLESGG
GLVQPGGSLRLSCAASGFTFSWYTMHWVRQAPGKGLEWVSSIYPSGGFTR
YADSVKGRFTISRDNSKNTLYLQMNSLRAEDTAVYYCTRQRYRGPKYYYY
MDVWGKGTTVTVSS
>620I-X0136-G05 = DX2930 Heavy Chain +
559C-M0192-A01 L4H scFv

(SEQ ID NO: 97)

EVQLLESGGGLVQPGGSLRLSCAASGFTFSHYIMMWVRQAPGKGLEWVSG
IYSSGGITVYADSVKGRFTISRDNSKNTLYLQMNSLRAEDTAVYYCAYRR
IGVPRRDEFDIWGQGTMVTVSSASTKGPSVFPLAPSSKSTSGGTAALGCL
VKDYFPEPVTVSWNSGALTSGVHTFPAVLQSSGLYSLSSVVTVPSSSLGT
QTYICNVNHKPSNTKVDKRVEPKSCDKTHTCPPCPAPELLGGPSVFLFPP
KPKDTLMISRTPEVTCVVVDVSHEDPEVKFNWYVDGVEVHNAKTKPREEQ
YNSTYRVVSVLTVLHQDWLNGKEYKCKVSNKALPAPIEKTISKAKGQPRE
PQVYTLPPSREEMTKNQVSLTCLVKGFYPSDIAVEWESNGQPENNYKTTP
PVLDSDGSFFLYSKLTVDKSRWQQGNVFSCSVMHEALHNHYTQKSLSLSP
GKSGGGSEVQLLESGGGLVQPGGSLRLSCAASGFTFSHYVMHWVRQAPGK
GLEWVSSIYPSGGLTKYADSVKGRFTISRDNSKNTLYLQMNSLRAEDTAV
YYCTRQRYRGPKYYYYMDVWGKGTTVTVSSGGGGSGGGGSGGGGSGGGGS
DIQMTQSPLSLPVTPGEPASISCRSSQSLLHSNGYNYLDWYLQKPGQSPQ
LLIYLGSNRASGVPDRFSGSGSGTDFTLKISRVEAEDVGVYYCMQALQTP
WTFGQGTKVEIKR
>620I-X0139-D12 = DX2930 Heavy Chain +
559C-M0192-A01 H4L scFv

(SEQ ID NO: 98)

EVQLLESGGGLVQPGGSLRLSCAASGFTFSHYIMMWVRQAPGKGLEWVSG
IYSSGGITVYADSVKGRFTISRDNSKNTLYLQMNSLRAEDTAVYYCAYRR
IGVPRRDEFDIWGQGTMVTVSSASTKGPSVFPLAPSSKSTSGGTAALGCL
VKDYFPEPVTVSWNSGALTSGVHTFPAVLQSSGLYSLSSVVTVPSSSLGT
QTYICNVNHKPSNTKVDKRVEPKSCDKTHTCPPCPAPELLGGPSVFLFPP
KPKDTLMISRTPEVTCVVVDVSHEDPEVKFNWYVDGVEVHNAKTKPREEQ
YNSTYRVVSVLTVLHQDWLNGKEYKCKVSNKALPAPIEKTISKAKGQPRE
PQVYTLPPSREEMTKNQVSLTCLVKGFYPSDIAVEWESNGQPENNYKTTP
PVLDSDGSFFLYSKLTVDKSRWQQGNVFSCSVMHEALHNHYTQKSLSLSP
GKSGGGSDIQMTQSPLSLPVTPGEPASISCRSSQSLLHSNGYNYLDWYLQ
KPGQSPQLLIYLGSNRASGVPDRFSGSGSGTDFTLKISRVEAEDVGVYYC
MQALQTPWTFGQGTKVEIKRTGGGGSGGGGSGGGGSGGGGSEVQLLESGG
GLVQPGGSLRLSCAASGFTFSHYVMHWVRQAPGKGLEWVSSIYPSGGLTK
YADSVKGRFTISRDNSKNTLYLQMNSLRAEDTAVYYCTRQRYRGPKYYYY
MDVWGKGTTVTVSS
>620I-X0136-A01 = DX2930 Heavy Chain +
559C-M0192-A03 L4H scFv

(SEQ ID NO: 99)

EVQLLESGGGLVQPGGSLRLSCAASGFTFSHYIMMWVRQAPGKGLEWVSG
IYSSGGITVYADSVKGRFTISRDNSKNTLYLQMNSLRAEDTAVYYCAYRR
IGVPRRDEFDIWGQGTMVTVSSASTKGPSVFPLAPSSKSTSGGTAALGCL
VKDYFPEPVTVSWNSGALTSGVHTFPAVLQSSGLYSLSSVVTVPSSSLGT
QTYI [symbol] NTKVDKRVEPKSCDKTHTCPPCPAPELLGGPSVFLFPPKPKDTL
MISRTPEVTCVVVDVSHEDPEVKFNWYVDGVEVHNAKTKPREEQYNSTYR
VVSVLTVLHQDWLNGKEYKCKVSNKALPAPIEKTISKAKGQPREPQVYTL
PPSREEMTKNQVSLTCLVKGFYPSDIAVEWESNGQPENNYKTTPPVLDSD
GSFFLYSKLTVDKSRWQQGNVFSCSVMHEALHNHYTQKSLSLSPGKSGGG
SEVQLLESGGGLVQPGGSLRLSCAASGFTFSWYVMQWVRQAPGKGLEWVS
SIYPSGGMTKYADSVKGRFTISRDNSKNTLYLQMNSLRAEDTAVYYCTRQ
RYRGPKYYYYMDVWGKGTTVTVSSGGGGSGGGGSGGGGSGGGGSDIQMTQ
SPLSLPVTPGEPASISCRSSQSLLHSNGYNYLDWYLQKPGQSPQLLIYLG
SNRASGVPDRFSGSGSGTDFTLKISRVEAEDVGVYYCMQALQTPWTFGQG
TKVEIKR
>620I-X0138-C12 = DX2930 Heavy Chain +
559C-M0192-A03 H4L scFv

(SEQ ID NO: 100)

EVQLLESGGGLVQPGGSLRLSCAASGFTFSHYIMMWVRQAPGKGLEWVSG
IYSSGGITVYADSVKGRFTISRDNSKNTLYLQMNSLRAEDTAVYYCAYRR
IGVPRRDEFDIWGQGTMVTVSSASTKGPSVFPLAPSSKSTSGGTAALGCL
VKDYFPEPVTVSWNSGALTSGVHTFPAVLQSSGLYSLSSVVTVPSSSLGT
QTYICNVNHKPSNTKVDKRVEPKSCDKTHTCPPCPAPELLGGPSVFLFPP
KPKDTLMISRTPEVTCVVVDVSHEDPEVKFNWYVDGVEVHNAKTKPREEQ
YNSTYRVVSVLTVLHQDWLNGKEYKCKVSNKALPAPIEKTISKAKGQPRE
PQVYTLPPSREEMTKNQVSLTCLVKGFYPSDIAVEWESNGQPENNYKTTP
PVLDSDGSFFLYSKLTVDKSRWQQGNVFSCSVMHEALHNHYTQKSLSLSP
GKSGGGSDIQMTQSPLSLPVTPGEPASISCRSSQSLLHSNGYNYLDWYLQ
KPGQSPQLLIYLGSNRASGVPDRFSGSGSGTDFTLKISRVEAEDVGVYYC
MQALQTPWTFGQGTKVEIKRTGGGGSGGGGSGGGGSGGGGSEVQLLESGG
GLVQPGGSLRLSCAASGFTFSWYVMQWVRQAPGKGLEWVSSIYPSGGMTK
YADSVKGRFTISRDNSKNTLYLQMNSLRAEDTAVYYCTRQRYRGPKYYYY
MDVWGKGTTVTVSS
>620I-X0136-G10 = DX2930 Heavy Chain +
559C-M0192-D02 L4H scFv

(SEQ ID NO: 101)

EVQLLESGGGLVQPGGSLRLSCAASGFTFSHYIMMWVRQAPGKGLEWVSG
IYSSGGITVYADSVKGRFTISRDNSKNTLYLQMNSLRAEDTAVYYCAYRR
IGVPRRDEFDIWGQGTMVTVSSASTKGPSVFPLAPSSKSTSGGTAALGCL
VKDYFPEPVTVSWNSGALTSGVHTFPAVLQSSGLYSLSSVVTVPSSSLGT
QTYICNVNHKPSNTKVDKRVEPKSCDKTHTCPPCPAPELLGGPSVFLFPP
KPKDTLMISRTPEVTCVVVDVSHEDPEVKFNWYVDGVEVHNAKTKPREEQ
YNSTYRVVSVLTVLHQDWLNGKEYKCKVSNKALPAPIEKTISKAKGQPRE
PQVYTLPPSREEMTKNQVSLTCLVKGFYPSDIAVEWESNGQPENNYKTTP
PVLDSDGSFFLYSKLTVDKSRWQQGNVFSCSVMHEALHNHYTQKSLSLSP
GKSGGGSEVQLLESGGGLVQPGGSLRLSCAASGFTFSQYVMHWVRQAPGK
GLEWVSSIWPSGGFTKYADSVKGRFTISRDNSKNTLYLQMNSLRAEDTAV
YYCTRQRYRGPKYYYYMDVWGKGTTVTVSSGGGGSGGGGSGGGGSGGGGS
DIQMTQSPLSLPVTPGEPASISCRSSQSLLHSNGYNYLDWYLQKPGQSPQ
LLIYLGSNRASGVPDRFSGSGSGTDFTLKISRVEAEDVGVYYCMQALQTP
WTFGQGTKVEIKR
>620I-X0138-D05 = DX2930 Heavy Chain +
559C-M0192-D02 H4L scFv

(SEQ ID NO: 102)

EVQLLESGGGLVQPGGSLRLSCAASGFTFSHYIMMWVRQAPGKGLEWVSG
IYSSGGITVYADSVKGRFTISRDNSKNTLYLQMNSLRAEDTAVYYCAYRR
IGVPRRDEFDIWGQGTMVTVSSASTKGPSVFPLAPSSKSTSGGTAALGCL
VKDYFPEPVTVSWNSGALTSGVHTFPAVLQSSGLYSLSSVVTVPSSSLGT
QTYICNVNHKPSNTKVDKRVEPKSCDKTHTCPPCPAPELLGGPSVFLFPP
KPKDTLMISRTPEVTCVVVDVSHEDPEVKFNWYVDGVEVHNAKTKPREEQ
YNSTYRVVSVLTVLHQDWLNGKEYKCKVSNKALPAPIEKTISKAKGQPRE
PQVYTLPPSREEMTKNQVSLTCLVKGFYPSDIAVEWESNGQPENNYKTTP
PVLDSDGSFFLYSKLTVDKSRWQQGNVFSCSVMHEALHNHYTQKSLSLSP
GKSGGGSDIQMTQSPLSLPVTPGEPASISCRSSQSLLHSNGYNYLDWYLQ
KPGQSPQLLIYLGSNRASGVPDRFSGSGSGTDFTLKISRVEAEDVGVYYC
MQALQTPWTFGQGTKVEIKRTGGGGSGGGGSGGGGSGGGGSEVQLLESGG
GLVQPGGSLRLSCAASGFTFSQYVMHWVRQAPGKGLEWVSSIWPSGGFTK
YADSVKGRFTISRDNSKNTLYLQMNSLRAEDTAVYYCTRQRYRGPKYYYY
MDVWGKGTTVTVSS
>620I-X0136-F07 = DX2930 Heavy Chain +
559C-M0192-D12 L4H scFv

(SEQ ID NO: 103)

EVQLLESGGGLVQPGGSLRLSCAASGFTFSHYIMMWVRQAPGKGLEWVSG
IYSSGGITVYADSVKGRFTISRDNSKNTLYLQMNSLRAEDTAVYYCAYRR
IGVPRRDEFDIWGQGTMVTVSSASTKGPSVFPLAPS [symbol] AALGCLVKDYFP
EPVTVSWNSGALTSGVHTFPAVLQSSGLYSLSSVVTVPSSSLGTQTYICN
VNHKPSNTKVDKRVEPKSCDKTHTCPPCPAPELLGGPSVFLFPPKPKDTL
MISRTPEVTCVVVDVSHEDPEVKFNWYVDGVEVHNAKTKPREEQYNSTYR
VVSVLTVLHQDWLNGKEYKCKVSNKALPAPIEKTISKAKGQPREPQVYTL
PPSREEMTKNQVSLTCLVKGFYPSDIAVEWESNGQPENNYKTTPPVLDSD
GSFFLYSKLTVDKSRWQQGNVFSCSVMHEALHNHYTQKSLSLSPGKSGGG
SEVQLLESGGGLVQPGGSLRLSCAASGFTFSWYIMQWVRQAPGKGLEWVS
SIYPSGGRTKYADSVKGRFTISRDNSKNTLYLQMNSLRAEDTAVYYCTRQ
RYRGPKYYYYMDVWGKGTTVTVSSGGGGSGGGGSGGGGSGGGGSDIQMTQ
SPLSLPVTPGEPASISCRSSQSLLHSNGYNYLDWYLQKPGQSPQLLIYLG
SNRASGVPDRFSGSGSGTDFTLKISRVEAEDVGVYYCMQALQTPWTFGQG
TKVEIKR
>620I-X0138-A01 = DX2930 Heavy Chain +
559C-M0192-D12 H4L scFv

(SEQ ID NO: 104)

EVQLLESGGGLVQPGGSLRLSCAASGFTFSHYIMMWVRQAPGKGLEWVSG
IYSSGGITVYADSVKGRFTISRDNSKNTLYLQMNSLRAEDTAVYYCAYRR
IGVPRRDEFDIWGQGTMVTVSSASTKGPSVFPLAPSSKSTSGGTAALGCL
VKDYFPEPVTVSWNSGALTSGVHTFPAVLQSSGLYSLSSVVTVPSSSLGT
QTYICNVNHKPSNTKVDKRVEPKSCDKTHTCPPCPAPELLGGPSVFLFPP
KPKDTLMISRTPEVTCVVVDVSHEDPEVKFNWYVDGVEVHNAKTKPREEQ
YNSTYRVVSVLTVLHQDWLNGKEYKCKVSNKALPAPIEKTISKAKGQPRE
PQVYTLPPSREEMTKNQVSLTCLVKGFYPSDIAVEWESNGQPENNYKTTP
PVLDSDGSFFLYSKLTVDKSRWQQGNVFSCSVMHEALHNHYTQKSLSLSP
GKSGGGSDIQMTQSPLSLPVTPGEPASISCRSSQSLLHSNGYNYLDWYLQ
KPGQSPQLLIYLGSNRASGVPDRFSGSGSGTDFTLKISRVEAEDVGVYYC
MQALQTPWTFGQGTKVEIKRTGGGGSGGGGSGGGGSGGGGSEVQLLESGG
GLVQPGGSLRLSCAASGFTFSWYIMQWVRQAPGKGLEWVSSIYPSGGRTK
YADSVKGRFTISRDNSKNTLYLQMNSLRAEDTAVYYCTRQRYRGPKYYYY
MDVWGKGTTVTVSS
>620I-X0142-E09 = DX2930 Heavy Chain +
559C-M0192-F01 L4H scFv

(SEQ ID NO: 105)

EVQLLESGGGLVQPGGSLRLSCAASGFTFSHYIMMWVRQAPGKGLEWVSG
IYSSGGITVYADSVKGRFTISRDNSKNTLYLQMNSLRAEDTAVYYCAYRR
IGVPRRDEFDIWGQGTMVTVSSASTKGPSVFPLAPSSKSTSGGTAALGCL
VKDYFPEPVTVSWNSGALTSGVHTFPAVLQSSGLYSLSSVVTVPSSSLGT
QTYICNVNHKPSNTKVDKRVEPKSCDKTHTCPPCPAPELLGGPSVFLFPP
KPKDTLMISRTPEVTCVVVDVSHEDPEVKFNWYVDGVEVHNAKTKPREEQ
YNSTYRVVSVLTVLHQDWLNGKEYKCKVSNKALPAPIEKTISKAKGQPRE
PQVYTLPPSREEMTKNQVSLTCLVKGFYPSDIAVEWESNGQPENNYKTTP
PVLDSDGSFFLYSKLTVDKSRWQQGNVFSCSVMHEALHNHYTQKSLSLSP
GKSGGGSEVQLLESGGGLVQPGGSLRLSCAASGFTFSWYNMAWVRQAPGK
GLEWVSRIYPSGGMTQYADSVKGRFTISRDNSKNTLYLQMNSLRAEDTAV
YYCTRQRYRGPKYYYYMDVWGKGTTVTVSSGGGGSGGGGSGGGGSGGGGS
DIQMTQSPLSLPVTPGEPASISCRSSQSLLHSNGYNYLDWYLQKPGQSPQ
LLIYLGSNRASGVPDRFSGSGSGTDFTLKISRVEAEDVGVYYCMQALQTP
WTFGQGTKVEIKR
>620I-X0138-D11 = DX2930 Heavy Chain +
559C-M0192-F01 H4L scFv

(SEQ ID NO: 106)

EVQLLESGGGLVQPGGSLRLSCAASGFTFSHYIMMWVRQAPGKGLEWVSG
IYSSGGITVYADSVKGRFTISRDNSKNTLYLQMNSLRAEDTAVYYCAYRR
IGVPRRDEFDIWGQGTMVTVSSASTKGPSVFPLAPSSKSTSGGTAALGCL
VKDYFPEPVTVSWNSGALTSGVHTFPAVLQSSGLYSLSSVVTVPSSSLGT
QTYICNVNHKPSNTKVDKRVEPKSCDKTHTCPPCPAPELLGGPSVFLFPP
KPKDTLMISRTPEVTCVVVDVSHEDPEVKFNWYVDGVEVHNAKTKPREEQ
YNSTYRVVSVLTVLHQDWLNGKEYKCKVSNKALPAPIEKTISKAKGQPRE
PQVYTLPPSREEMTKNQVSLTCLVKGFYPSDIAVEWESNGQPENNYKTTP
PVLDSDGSFFLYSKLTVDKSRWQQGNVFSCSVMHEALHNHYTQKSLSLSP
GKSGGGSDIQMTQSPLSLPVTPGEPASISCRSSQSLLHSNGYNYLDWYLQ
KPGQSPQLLIYLGSNRASGVPDRFSGSGSGTDFTLKISRVEAEDVGVYYC
MQALQTPWTFGQGTKVEIKRTGGGGSGGGGSGGGGSGGGGSEVQLLESGG
GLVQPGGSLRLSCAASGFTFSWYNMAWVRQAPGKGLEWVSRIYPSGGMTQ
YADSVKGRFTISRDNSKNTLYLQMNSLRAEDTAVYYCTRQRYRGPKYYYY
MDVWGKGTTVTVSS
>620I-X0136-C05 = DX2930 Heavy Chain +
559C-M0192-F06 L4H scFv

(SEQ ID NO: 107)

EVQLLESGGGLVQPGGSLRLSCAASGFTFSHYIMMWVRQAPGKGLEWVSG
IYSSGGITVYADSVKGRF [symbol] NTLYLQMNSLRAEDTAVYYCAYRRIGVPRR
DEFDIWGQGTMVTVSSASTKGPSVFPLAPSSKSTSGGTAALGCLVKDYFP
EPVTVSWNSGALTSGVHTFPAVLQSSGLYSLSSVVTVPSSSLGTQTYICN
VNHKPSNTKVDKRVEPKSCDKTHTCPPCPAPELLGGPSVFLFPPKPKDTL
MISRTPEVTCVVVDVSHEDPEVKFNWYVDGVEVHNAKTKPREEQYNSTYR
VVSVLTVLHQDWLNGKEYKCKVSNKALPAPIEKTISKAKGQPREPQVYTL
PPSREEMTKNQVSLTCLVKGFYPSDIAVEWESNGQPENNYKTTPPVLDSD
GSFFLYSKLTVDKSRWQQGNVFSCSVMHEALHNHYTQKSLSLSPGKSGGG
SEVQLLESGGGLVQPGGSLRLSCAASGFTFSWYVMHWVRQAPGKGLEWVS
SIYPSGGKTSYADSVKGRFTISRDNSKNTLYLQMNSLRAEDTAVYYCTRQ
RYRGPKYYYYMDVWGKGTTVTVSSGGGGSGGGGSGGGGSGGGGSDIQMTQ
SPLSLPVTPGEPASISCRSSQSLLHSNGYNYLDWYLQKPGQSPQLLIYLG
SNRASGVPDRFSGSGSGTDFTLKISRVEAEDVGVYYCMQALQTPWTFGQG
TKVEIKR
>620I-X0142-A02 = DX2930 Heavy Chain +
559C-M0192-F06 H4L scFv

(SEQ ID NO: 108)

EVQLLESGGGLVQPGGSLRLSCAASGFTFSHYIMMWVRQAPGKGLEWVSG
IYSSGGITVYADSVKGRFTISRDNSKNTLYLQMNSLRAEDTAVYYCAYRR
IGVPRRDEFDIWGQGTMVTVSSASTKGPSVFPLAPSSKSTSGGTAALGCL
VKDYFPEPVTVSWNSGALTSGVHTFPAVLQSSGLYSLSSVVTVPSSSLGT
QTYICNVNHKPSNTKVDKRVEPKSCDKTHTCPPCPAPELLGGPSVFLFPP
KPKDTLMISRTPEVTCVVVDVSHEDPEVKFNWYVDGVEVHNAKTKPREEQ
YNSTYRVVSVLTVLHQDWLNGKEYKCKVSNKALPAPIEKTISKAKGQPRE
PQVYTLPPSREEMTKNQVSLTCLVKGFYPSDIAVEWESNGQPENNYKTTP
PVLDSDGSFFLYSKLTVDKSRWQQGNVFSCSVMHEALHNHYTQKSLSLSP
GKSGGGSDIQMTQSPLSLPVTPGEPASISCRSSQSLLHSNGYNYLDWYLQ
KPGQSPQLLIYLGSNRASGVPDRFSGSGSGTDFTLKISRVEAEDVGVYYC
MQALQTPWTFGQGTKVEIKRTGGGGSGGGGSGGGGSGGGGSEVQLLESGG
GLVQPGGSLRLSCAASGFTFSWYVMHWVRQAPGKGLEWVSSIYPSGGKTS
YADSVKGRFTISRDNSKNTLYLQMNSLRAEDTAVYYCTRQRYRGPKYYYY
MDVWGKGTTVTVSS
>620I-X0136-C04 = DX2930 Heavy Chain +
559C-M0192-F07 L4H scFv

(SEQ ID NO: 109)

EVQLLESGGGLVQPGGSLRLSCAASGFTFSHYIMMWVRQAPGKGLEWVSG
IYSSGGITVYADSVKGRFTISRDNSKNTLYLQMNSLRAEDTAVYYCAYRR
IGVPRRDEFDIWGQGTMVTVSSASTKGPSVFPLAPSSKSTSGGTAALGCL
VKDYFPEPVTVSWNSGALTSGVHTFPAVLQSSGLYSLSSVVTVPSSSLGT
QTYICNVNHKPSNTKVDKRVEPKSCDKTHTCPPCPAPELLGGPSVFLFPP
KPKDTLMISRTPEVTCVVVDVSHEDPEVKFNWYVDGVEVHNAKTKPREEQ
YNSTYRVVSVLTVLHQDWLNGKEYKCKVSNKALPAPIEKTISKAKGQPRE
PQVYTLPPSREEMTKNQVSLTCLVKGFYPSDIAVEWESNGQPENNYKTTP
PVLDSDGSFFLYSKLTVDKSRWQQGNVFSCSVMHEALHNHYTQKSLSLSP
GKSGGGSEVQLLESGGGLVQPGGSLRLSCAASGFTFSQYVMSWVRQAPGK
GLEWVSRIYPSGGVTKYADSVKGRFTISRDNSKNTLYLQMNSLRAEDTAV
YYCTRQRYRGPKYYYYMDVWGKGTTVTVSSGGGGSGGGGSGGGGSGGGGS
DIQMTQSPLSLPVTPGEPASISCRSSQSLLHSNGYNYLDWYLQKPGQSPQ
LLIYLGSNRASGVPDRFSGSGSGTDFTLKISRVEAEDVGVYYCMQALQTP
WTFGQGTKVEIKR
>620I-X0138-F02 = DX2930 Heavy Chain +
559C-M0192-F07 H4L scFv

(SEQ ID NO: 110)

EVQLLESGGGLVQPGGSLRLSCAASGFTFSHYIMMWVRQAPGKGLEWVSG
IYSSGGITVYADSVKGRFTISRDNSKNTLYLQMNSLRAEDTAVYYCAYRR
IGVPRRDEFDIWGQGTMVTVSSASTKGPSVFPLAPSSKSTSGGTAALGCL
VKDYFPEPVTVSWNSGALTSGVHTFPAVLQSSGLYSLSSVVTVPSSSLGT
QTYICNVNHKPSNTKVDKRVEPKSCDKTHTCPPCPAPELLGGPSVFLFPP
KPKDTLMISRTPEVTCVVVDVSHEDPEVKFNWYVDGVEVHNAKTKPREEQ
YNSTYRVVSVLTVLHQDWLNGKEYKCKVSNKALPAPIEKTISKAKGQPRE
PQVYTLPPSREEMTKNQVSLTCLVKGFYPSDIAVEWESNGQPENNYKTTP
PVLDSDGSFFLYSKLTVDKSRWQQGNVFSCSVMHEALHNHYTQKSLSLSP
GKSGGGSDIQMTQSPLSLPVTPGEPASISCRSSQSLLHSNGYNYLDWYLQ
KPGQSPQLLIYLGSNRASGVPDRFSGSGSGTDFTLKISRVEAEDVGVYYC
MQALQTPWTFGQGTKVEIKRTGGGGSGGGGSGGGGSGGGGSEVQLLESGG
GLVQPGGSLRLSCAASGFTFSQYVMSWVRQAPGKGLEWVSRIYPSGGVTK
YADSVKGRFTISRDNSKNTLYLQMNSLRAEDTAVYYCTRQRYRGPKYYYY
MDVWGKGTTVTVSS
>620I-X0136-G04 = DX2930 Heavy Chain +
559C-M0192-G03 L4H scFv

(SEQ ID NO: 111)

[symbol]

GGLVQPGGSLRLSCAASGFTFSHYIMMWVRQAPGKGLEWVSGIYSSGGI
TVYADSVKGRFTISRDNSKNTLYLQMNSLRAEDTAVYYCAYRRIGVPRRD
EFDIWGQGTMVTVSSASTKGPSVFPLAPSSKSTSGGTAALGCLVKDYFPE
PVTVSWNSGALTSGVHTFPAVLQSSGLYSLSSVVTVPSSSLGTQTYICNV
NHKPSNTKVDKRVEPKSCDKTHTCPPCPAPELLGGPSVFLFPPKPKDTLM
ISRTPEVTCVVVDVSHEDPEVKFNWYVDGVEVHNAKTKPREEQYNSTYRV
VSVLTVLHQDWLNGKEYKCKVSNKALPAPIEKTISKAKGQPREPQVYTLP
PSREEMTKNQVSLTCLVKGFYPSDIAVEWESNGQPENNYKTTPPVLDSDG
SFFLYSKLTVDKSRWQQGNVFSCSVMHEALHNHYTQKSLSLSPGKSGGGS
EVQLLESGGGLVQPGGSLRLSCAASGFTFSQYNMVWVRQAPGKGLEWVSR
IWPSGGKTTYADSVKGRFTISRDNSKNTLYLQMNSLRAEDTAVYYCTRQR
YRGPKYYYYMDVWGKGTTVTVSSGGGGSGGGGSGGGGSGGGGSDIQMTQS
PLSLPVTPGEPASISCRSSQSLLHSNGYNYLDWYLQKPGQSPQLLIYLGS
NRASGVPDRFSGSGSGTDFTLKISRVEAEDVGVYYCMQALQTPWTFGQGT
KVEIKR
>620I-X0139-G12 = DX2930 Heavy Chain +
559C-M0192-G03 H4L scFv

(SEQ ID NO: 112)

EVQLLESGGGLVQPGGSLRLSCAASGFTFSHYIMMWVRQAPGKGLEWVSG
IYSSGGITVYADSVKGRFTISRDNSKNTLYLQMNSLRAEDTAVYYCAYRR
IGVPRRDEFDIWGQGTMVTVSSASTKGPSVFPLAPSSKSTSGGTAALGCL
VKDYFPEPVTVSWNSGALTSGVHTFPAVLQSSGLYSLSSVVTVPSSSLGT
QTYICNVNHKPSNTKVDKRVEPKSCDKTHTCPPCPAPELLGGPSVFLFPP
KPKDTLMISRTPEVTCVVVDVSHEDPEVKFNWYVDGVEVHNAKTKPREEQ
YNSTYRVVSVLTVLHQDWLNGKEYKCKVSNKALPAPIEKTISKAKGQPRE
PQVYTLPPSREEMTKNQVSLTCLVKGFYPSDIAVEWESNGQPENNYKTTP
PVLDSDGSFFLYSKLTVDKSRWQQGNVFSCSVMHEALHNHYTQKSLSLSP
GKSGGGSDIQMTQSPLSLPVTPGEPASISCRSSQSLLHSNGYNYLDWYLQ
KPGQSPQLLIYLGSNRASGVPDRFSGSGSGTDFTLKISRVEAEDVGVYYC
MQALQTPWTFGQGTKVEIKRTGGGGSGGGGSGGGGSGGGGSEVQLLESGG
GLVQPGGSLRLSCAASGFTFSQYNMVWVRQAPGKGLEWVSRIWPSGGKTT
YADSVKGRFTISRDNSKNTLYLQMNSLRAEDTAVYYCTRQRYRGPKYYYY
MDVWGKGTTVTVSS
>620I-X0136-B11 = DX2930 Heavy Chain +
559C-M0192-G05 L4H scFv

(SEQ ID NO: 113)

EVQLLESGGGLVQPGGSLRLSCAASGFTFSHYIMMWVRQAPGKGLEWVSG
IYSSGGITVYADSVKGRFTISRDNSKNTLYLQMNSLRAEDTAVYYCAYRR
IGVPRRDEFDIWGQGTMVTVSSASTKGPSVFPLAPSSKSTSGGTAALGCL
VKDYFPEPVTVSWNSGALTSGVHTFPAVLQSSGLYSLSSVVTVPSSSLGT
QTYICNVNHKPSNTKVDKRVEPKSCDKTHTCPPCPAPELLGGPSVFLFPP
KPKDTLMISRTPEVTCVVVDVSHEDPEVKFNWYVDGVEVHNAKTKPREEQ
YNSTYRVVSVLTVLHQDWLNGKEYKCKVSNKALPAPIEKTISKAKGQPRE
PQVYTLPPSREEMTKNQVSLTCLVKGFYPSDIAVEWESNGQPENNYKTTP
PVLDSDGSFFLYSKLTVDKSRWQQGNVFSCSVMHEALHNHYTQKSLSLSP
GKSGGGSEVQLLESGGGLVQPGGSLRLSCAASGFTFSQYTMVWVRQAPGK
GLEWVSRIYPSGGVTQYADSVKGRFTISRDNSKNTLYLQMNSLRAEDTAV
YYCTRQRYRGPKYYYYMDVWGKGTTVTVSSGGGGSGGGGSGGGGSGGGGS
DIQMTQSPLSLPVTPGEPASISCRSSQSLLHSNGYNYLDWYLQKPGQSPQ
LLIYLGSNRASGVPDRFSGSGSGTDFTLKISRVEAEDVGVYYCMQALQTP
WTFGQGTKVEIKR
>620I-X0142-D04 = DX2930 Heavy Chain +
559C-M0192-G05 H4L scFv

(SEQ ID NO: 114)

EVQLLESGGGLVQPGGSLRLSCAASGFTFSHYIMMWVRQAPGKGLEWVSG
IYSSGGITVYADSVKGRFTISRDNSKNTLYLQMNSLRAEDTAVYYCAYRR
IGVPRRDEFDIWGQGTMVTVSSASTKGPSVFPLAPSSKSTSGGTAALGCL
VKDYFPEPVTVSWNSGALTSGVHTFPAVLQSSGLYSLSSVVTVPSSSLGT
QTYICNVNHKPSNTKVDKRVEPKSCDKTHTCPPCPAPELLGGPSVFLFPP
KPKDTLMISRTPEVTCVVVDVSHEDPEVKFNWYVDGVEVHNAKTKPREEQ
YNSTYRVVSVLTVLHQDWLNGKEYKCKVSNKALPAPIEKTISKAKGQPRE
PQVYTLPPSREEMTKNQVSLTCLVKGFYPSDIAVEWESNGQPENNYKTTP
PVLDSDGSFFLYSKLTVDKSRWQQGNVFSCSVMHEALHNHYTQKSLSLSP
GKSGGGSDIQMTQSPLSLPVTPGEPASISCRSSQSLLHSNGYNYLDWYLQ
KPGQSPQLLIYLGSNRASGVPDRFSGSGSGTDFTLKISRVEAEDVGVYYC
MQALQTPWTFGQGTKVEIKRTGGGGSGGGGSGGGGSGGGGSEVQLLESGG
GLVQPGGSLRLSCAASGFTFSQYTMVWVRQAPGKGLEWVSRIYPSGGVTQ
YADSVKGRFTISRDNSKNTLYLQMNSLRAEDTAVYYCTRQRYRGPKYYYY
MDVWGKGTTVTVSS
>620I-X0136-D06 = DX2930 Heavy Chain +
559C-M0192-H04 L4H scFv

(SEQ ID NO: 115)

EVQLLESGGGLVQPGGSLRLSCAASGFTFSHYIMMWVRQAPGKGLEWVSG
IYSSGGITVYADSVKGRFTISRDNSKNTLYLQMNSLRAEDTAVYYCAYRR
IGVPRRDEFDIWGQGTMVTVSSASTKGPSVFPLAPSSKSTSGGTAALGCL
VKDYFPEPVTVSWNSGALTSGVHTFPAVLQSSGLYSLSSVVTVPSSSLGT
QTYICNVNHKPSNTKVDKRVEPKSCDKTHTCPPCPAPELLGGPSVFLFPP
KPKDTLMISRTPEVTCVVVDVSHEDPEVKFNWYVDGVEVHNAKTKPREEQ
YNSTYRVVSVLTVLHQDWLNGKEYKCKVSNKALPAPIEKTISKAKGQPRE
PQVYTLPPSREEMTKNQVSLTCLVKGFYPSDIAVEWESNGQPENNYKTTP
PVLDSDGSFFLYSKLTVDKSRWQQGNVFSCSVMHEALHNHYTQKSLSLSP
GKSGGGSEVQLLESGGGLVQPGGSLRLSCAASGFTFSQYVMHWVRQAPGK
GLEWVSRIYPSGGLTNYADSVKGRFTISRDNSKNTLYLQMNSLRAEDTAV
YYCTRQRYRGPKYYYYMDVWGKGTTVTVSSGGGGSGGGGSGGGGSGGGGS
DIQMTQSPLSLPVTPGEPASISCRSSQSLLHSNGYNYLDWYLQKPGQSPQ
LLIYLGSNRASGVPDRFSGSGSGTDFTLKISRVEAEDVGVYYCMQALQTP
WTFGQGTKVEIKR
>620I-X0139-A01 = DX2930 Heavy Chain +
559C-M0192-H04 H4L scFv

(SEQ ID NO: 116)

EVQLLESGGGLVQPGGSLRLSCAASGFTFSHYIMMWVRQAPGKGLEWVSG
IYSSGGITVYADSVKGRFTISRDNSKNTLYLQMNSLRAEDTAVYYCAYRR
IGVPRRDEFDIWGQGTMVTVSSASTKGPSVFPLAPSSKSTSGGTAALGCL
VKDYFPEPVTVSWNSGALTSGVHTFPAVLQSSGLYSLSSVVTVPSSSLGT
QTYICNVNHKPSNTKVDKRVEPKSCDKTHTCPPCPAPELLGGPSVFLFPP
KPKDTLMISRTPEVTCVVVDVSHEDPEVKFNWYVDGVEVHNAKTKPREEQ
YNSTYRVVSVLTVLHQDWLNGKEYKCKVSNKALPAPIEKTISKAKGQPRE
PQVYTLPPSREEMTKNQVSLTCLVKGFYPSDIAVEWESNGQPENNYKTTP
PVLDSDGSFFLYSKLTVDKSRWQQGNVFSCSVMHEALHNHYTQKSLSLSP
GKSGGGSDIQMTQSPLSLPVTPGEPASISCRSSQSLLHSNGYNYLDWYLQ
KPGQSPQLLIYLGSNRASGVPDRFSGSGSGTDFTLKISRVEAEDVGVYYC
MQALQTPWTFGQGTKVEIKRTGGGGSGGGGSGGGGSGGGGSEVQLLESGG
GLVQPGGSLRLSCAASGFTFSQYVMHWVRQAPGKGLEWVSRIYPSGGLTN
YADSVKGRFTISRDNSKNTLYLQMNSLRAEDTAVYYCTRQRYRGPKYYYY
MDVWGKGTTVTVSS
>620I-X0136-D12 = DX2930 Heavy Chain +
559C-M0192-H11 L4H scFv

(SEQ ID NO: 117)

EVQLLESGGGLVQPGGSLRLSCAASGFTFSHYIMMWVRQAPGKGLEWVSG
IYSSGGITVYADSVKGRFTISRDNSKNTLYLQMNSLRAEDTAVYYCAYRR
IGVPRRDEFDIWGQGTMVTVSSASTKGPSVFPLAPSSKSTSGGTAALGCL
VKDYFPEPVTVSWNSGALTSGVHTFPAVLQSSGLYSLSSVVTVPSSSLGT
QTYICNVNHKPSNTKVDKRVEPKSCDKTHTCPPCPAPELLGGPSVFLFPP
KPKDTLMISRTPEVTCVVVDVSHEDPEVKFNWYVDGVEVHNAKTKPREEQ
YNSTYRVVSVLTVLHQDWLNGKEYKCKVSNKALPAPIEKTISKAKGQPRE
PQVYTLPPSREEMTKNQVSLTCLVKGFYPSDIAVEWESNGQPENNYKTTP
PVLDSDGSFFLYSKLTVDKSRWQQGNVFSCSVMHEALHNHYTQKSLSLSP
GKSGGGSEVQLLESGGGLVQPGGSLRLSCAASGFTFSQYVMHWVRQAPGK
GLEWVSSIWPSGGHTRYADSVKGRFTISRDNSKNTLYLQMNSLRAEDTAV
YYCTRQRYRGPKYYYYMDVWGKGTTVTVSSGGGGSGGGGSGGGGSGGGGS
DIQMTQSPLSLPVTPGEPASISCRSSQSLLHSNGYNYLDWYLQKPGQSPQ
LLIYLGSNRASGVPDRFSGSGSGTDFTLKISRVEAEDVGVYYCMQALQTP
WTFGQGTKVEIKR
>620I-X0138-F05 = DX2930 Heavy Chain +
559C-M0192-H11 H4L scFv

(SEQ ID NO: 118)

EVQLLESGGGLVQPGGSLRLSCAASGFTFSHYIMMWVRQAPGKGLEWVSG
IYSSGGITVYADSVKGRFTISRDNSKNTLYLQMNSLRAEDTAVYYCAYRR
IGVPRRDEFDIWGQGTMVTVSSASTKGPSVFPLAPSSKSTSGGTAALGCL
VKDYFPEPVTVSWNSGALTSGVHTFPAVLQSSGLYSLSSVVTVPSSSLGT
QTYICNVNHKPSNTKVDKRVEPKSCDKTHTCPPCPAPELLGGPSVFLFPP
KPKDTLMISRTPEVTCVVVDVSHEDPEVKFNWYVDGVEVHNAKTKPREEQ
YNSTYRVVSVLTVLHQDWLNGKEYKCKVSNKALPAPIEKTISKAKGQPRE
PQVYTLPPSREEMTKNQVSLTCLVKGFYPSDIAVEWESNGQPENNYKTTP
PVLDSDGSFFLYSKLTVDKSRWQQGNVFSCSVMHEALHNHYTQKSLSLSP
GKSGGGSDIQMTQSPLSLPVTPGEPASISCRSSQSLLHSNGYNYLDWYLQ
KPGQSPQLLIYLGSNRASGVPDRFSGSGSGTDFTLKISRVEAEDVGVYYC
MQALQTPWTFGQGTKVEIKRTGGGGSGGGGSGGGGSGGGGSEVQLLESGG
GLVQPGGSLRLS [symbol] SQYVMHWVRQAPGKGLEWVSSIWPSGGHTRYADSVKG
RFTISRDNSKNTLYLQMNSLRAEDTAVYYCTRQRYRGPKYYYYMDVWGKG
TTVTVSS
>620I-X0136-A11 = DX2930 Heavy Chain +
559C-M0292-D07 L4H scFv

(SEQ ID NO: 119)

EVQLLESGGGLVQPGGSLRLSCAASGFTFSHYIMMWVRQAPGKGLEWVSG
IYSSGGITVYADSVKGRFTISRDNSKNTLYLQMNSLRAEDTAVYYCAYRR
IGVPRRDEFDIWGQGTMVTVSSASTKGPSVFPLAPSSKSTSGGTAALGCL
VKDYFPEPVTVSWNSGALTSGVHTFPAVLQSSGLYSLSSVVTVPSSSLGT
QTYICNVNHKPSNTKVDKRVEPKSCDKTHTCPPCPAPELLGGPSVFLFPP
KPKDTLMISRTPEVTCVVVDVSHEDPEVKFNWYVDGVEVHNAKTKPREEQ
YNSTYRVVSVLTVLHQDWLNGKEYKCKVSNKALPAPIEKTISKAKGQPRE
PQVYTLPPSREEMTKNQVSLTCLVKGFYPSDIAVEWESNGQPENNYKTTP
PVLDSDGSFFLYSKLTVDKSRWQQGNVFSCSVMHEALHNHYTQKSLSLSP
GKSGGGSEVQLLESGGGLVQPGGSLRLSCAASGFTFSNYVMHWVRQAPGK
GLEWVSSIWPSGGKTKYADSVKGRFTISRDNSKNTLYLQMNSLRAEDTAV
YYCTRQRYRGPKYYYYMDAWGQGTTVTVSSGGGGSGGGGSGGGGSGGGGS
DIQMTQSPLSLPVTPGEPASISCRSSQSLLHSNGYNYLDWYLQKPGQSPQ
LLIYLGSNRASGVPDRFSGSGSGTDFTLKISRVEAEDVGVYYCMQALQTP
WTFGQGTKVEIKR
>620I-X0139-E05 = DX2930 Heavy Chain +
559C-M0292-D07 H4L scFv

(SEQ ID NO: 120)

EVQLLESGGGLVQPGGSLRLSCAASGFTFSHYIMMWVRQAPGKGLEWVSG
IYSSGGITVYADSVKGRFTISRDNSKNTLYLQMNSLRAEDTAVYYCAYRR
IGVPRRDEFDIWGQGTMVTVSSASTKGPSVFPLAPSSKSTSGGTAALGCL
VKDYFPEPVTVSWNSGALTSGVHTFPAVLQSSGLYSLSSVVTVPSSSLGT
QTYICNVNHKPSNTKVDKRVEPKSCDKTHTCPPCPAPELLGGPSVFLFPP
KPKDTLMISRTPEVTCVVVDVSHEDPEVKFNWYVDGVEVHNAKTKPREEQ
YNSTYRVVSVLTVLHQDWLNGKEYKCKVSNKALPAPIEKTISKAKGQPRE
PQVYTLPPSREEMTKNQVSLTCLVKGFYPSDIAVEWESNGQPENNYKTTP
PVLDSDGSFFLYSKLTVDKSRWQQGNVFSCSVMHEALHNHYTQKSLSLSP
GKSGGGSDIQMTQSPLSLPVTPGEPASISCRSSQSLLHSNGYNYLDWYLQ
KPGQSPQLLIYLGSNRASGVPDRFSGSGSGTDFTLKISRVEAEDVGVYYC
MQALQTPWTFGQGTKVEIKRTGGGGSGGGGSGGGGSGGGGSEVQLLESGG
GLVQPGGSLRLSCAASGFTFSNYVMHWVRQAPGKGLEWVSSIWPSGGKTK
YADSVKGRFTISRDNSKNTLYLQMNSLRAEDTAVYYCTRQRYRGPKYYYY
MDAWGQGTTVTVSS
>620I-X0136-C12 = DX2930 Heavy Chain +
559C-M0177-A06 L4H scFv

(SEQ ID NO: 121)

EVQLLESGGGLVQPGGSLRLSCAASGFTFSHYIMMWVRQAPGKGLEWVSG
IYSSGGITVYADSVKGRFTISRDNSKNTLYLQMNSLRAEDTAVYYCAYRR
IGVPRRDEFDIWGQGTMVTVSSASTKGPSVFPLAPSSKSTSGGTAALGCL
VKDYFPEPVTVSWNSGALTSGVHTFPAVLQSSGLYSLSSVVTVPSSSLGT
QTYICNVNHKPSNTKVDKRVEPKSCDKTHTCPPCPAPELLGGPSVFLFPP
KPKDTLMISRTPEVTCVVVDVSHEDPEVKFNWYVDGVEVHNAKTKPREEQ
YNSTYRVVSVLTVLHQDWLNGKEYKCKVSNKALPAPIEKTISKAKGQPRE
PQVYTLPPSREEMTKNQVSLTCLVKGFYPSDIAVEWESNGQPENNYKTTP
PVLDSDGSFFLYSKLTVDKSRWQQGNVFSCSVMHEALHNHYTQKSLSLSP
GKSGGGSEVQLLESGGGLVQPGGSLRLSCAASGFTFSFYSMHWVRQAPGK
GLEWVSRIYPSGGITSYADSVKGRFTISRDNSKNTLYLQMNSLRAEDTAV
YYCTRQRYRGPKYYYYMDVWGKGTTVTVSSGGGGSGGGGSGGGGSGGGGS
DIQMTQSPLSLPVTPGEPASISCRSSQSLLHSNGYNYLDWYLQKPGQSPQ
LLIYLGSNRASGVPDRFSGSGSGTDFTLKISRVEAEDVGVYYCMQALQTP
WTFGQGTKVEIKR
>620I-X0138-E05 = DX2930 Heavy Chain +
559C-M0177-A06 H4L scFv

(SEQ ID NO: 122)

EVQLLESGGGLVQPGGSLRLSCAASGFTFSHYIMMWVRQAPGKGLEWVSG
IYSSGGITVYADSVKGRFTISRDNSKNTLYLQMNSLRAEDTAVYYCAYRR
IGVPRRDEFDIWGQGTMVTVSSASTKGPSVFPLAPSSKSTSGGTAALGCL
VKDYFPEPVTVSWNSGALTSGVHTFPAVLQSSGLYSLSSVVTVPSSSLGT
QTYICNVNHKPSNTKVDKRVEPKSCDKTHTCPPCPAPELLGGPSVFLFPP
KPKDTLMISRTPEVTCVVVDVSHEDPEVKFNWYVDGVEVHNAKTKPREEQ
YNSTYRVVSVLTVLHQDWLNGKEYKCKVSNKALPAPIEKTISKAKGQPRE
PQVYTLPPSREEMTKNQVSLTCLVKGFYPSDIAVEWESNGQPENNYKTTP
PVLDSDGSFFLYSKLTVDKSRWQQGNVFSCSVMHEALHNHYTQKSLSLSP
GKSGGGSDIQMTQSPLSLPVTPGEPASISCRSSQSLLHSNGYNYLDWYLQ
KPGQSPQLLIYLGSNRASGVPDRFSGSGSGTDFTLKISRVEAED [symbol] ALQTP
WTFGQGTKVEIKRTGGGGSGGGGSGGGGSGGGGSEVQLLESGGGLVQPGG
SLRLSCAASGFTFSFYSMHWVRQAPGKGLEWVSRIYPSGGITSYADSVKG
RFTISRDNSKNTLYLQMNSLRAEDTAVYYCTRQRYRGPKYYYYMDVWGKG
TTVTVSS [symbol]
indicates data missing or illegible when filed

### EXAMPLE 3

### Construction and Characterization of Exemplary Bispecific Antibodies That Contain Disulfide Bond

[0168] To combat these aggregates, a disulfide bond between the VH residue 44 (C₄₄) and VL residue 100 (C₁₀₀) was engineered into the scFv region for 4 clones, 620I-X0177-A01 (620I-X0173-A11), 620I-X0177-C01 (620I-X0173-C07), 620I-X0177-E01 (620I-X0173-E07), and 620I-X0177-G01 (620I-X0173-G11). SEC analysis of the bispecifics containing scFvs with disulfides showed dramatic reduction of the high molecular weight peaks, bringing the ranges down to 1-2%. FIG. 4. This reduction of aggregation applied across all concentrations tested. Biacore of these bispecific clones showed tight, specific binding to pKal and FXIIa (FIG. 9). The plasma inhibition of these isolates ranged from the 0.5 to 8 nM range (FIG. 10).

[0169] The plasma inhibition assay as described herein was performed to determine the inhibitory activity of bispecific antibody 620I-X0177-A01. The plasma was diluted 1:40 and the inhibitors were added to the diluted plasma. 2.5% (final concentration) of a dilute Ellagic Acid solution was added to the plasma. Around 2 minutes later, activation of plasma was quenched by addition of CTI. The pKal activity in the plasma was measured by addition of a profluorescecent substrate as described herein. The results thus obtained were shown in FIG. 11.

[0170] The inhibitory activity of clone 620I-X0177-A01 was compared with that of the parent antibodies, either alone or in combination. Drop-offs in affinity were observed between the parental IgGs and the bispecific antibody. FIG. 12.

[0171] Further, the abilities of various bispecific antibodies on APTT were assessed following the methods described herein. All tested antibodies showed dose-dependent delay of APTT. FIG. 13.

[0172] The abilities of antibody clones 1A01 (anti-FXIIa) and 7A01 (bispecific against both pKal and FXII) to inhibit fibrin deposition were also examined and the results are shown in FIG. 14. A dose-dependent inhibition of fibrin deposition was observed.

[0173] Overall, enzyme inhibition assays determined that the apparent Ki values of the individual anti-pKal and anti-FXIIa components of the exemplary bispecific antibody 620I-X0177-A01 were similar to the parental molecules, with apparent Ki values of 389 pM and 73 pM, respectively. Surprisingly, additional experiments in contact-activated dilute plasma reveal that this bispecific antibody was >5 times more effective at preventing pKal generation than a 1:1 combination of the parent antibodies, and >20-fold more effective than either of the parent antibodies alone. These data suggest that a bispecific antibody would be uniquely potent in its ability to shut down the positive feedback loop of contact system activation.

[0174] The sequences of the bispecific antibodies with disulfide constrained scFvs are provided below:

> 620I-X0173-A11 (620I-X0177-A01) =
620I-X0136-D12 Germlined + Gene
optimized scFv + disulfide stabilization

(SEQ ID NO: 47)

EVQLLESGGGLVQPGGSLRLSCAASGFTFSHYIMMWVRQAPGKGLEWVSG
IYSSGGITVYADSVKGRFTISRDNSKNTLYLQMNSLRAEDTAVYYCAYRR
IGVPRRDEFDIWGQGTMVTVSSASTKGPSVFPLAPSSKSTSGGTAALGCL
VKDYFPEPVTVSWNSGALTSGVHTFPAVLQSSGLYSLSSVVTVPSSSLGT
QTYICNVNHKPSNTKVDKRVEPKSCDKTHTCPPCPAPELLGGPSVFLFPP
KPKDTLMISRTPEVTCVVVDVSHEDPEVKFNWYVDGVEVHNAKTKPREEQ
YNSTYRVVSVLTVLHQDWLNGKEYKCKVSNKALPAPIEKTISKAKGQPRE
PQVYTLPPSREEMTKNQVSLTCLVKGFYPSDIAVEWESNGQPENNYKTTP
PVLDSDGSFFLYSKLTVDKSRWQQGNVFSCSVMHEALHNHYTQKSLSLSP
GKSGGGSEVQLLESGGGLVQPGGSLRLSCAASGFTFSQYVMHWVRQAPGK
CLEWVSSIWPSGGHTRYADSVKGRFTISRDNSKNTLYLQMNSLRAEDTAV
YYCARQRYRGPKYYYYMDVWGQGTTVTVSSGGGGSGGGGSGGGGSGGGGS
DIVMTQSPLSLPVTPGEPASISCRSSQSLLHSNGYNYLDWYLQKPGQSPQ
LLIYLGSNRASGVPDRFSGSGSGTDFTLKISRVEAEDVGVYYCMQALQTP
WTFGCGTKVEIKR
>620I-X0173-C07 (620I-X0177-C01) =
620I-X0136-C05 Germlined + Gene optimized
scFv + disulfide stabilization

(SEQ ID NO: 48)

EVQLLESGGGLVQPGGSLRLSCAASGFTFSHYIMMWVRQAPGKGLEWVSG
IYSSGGITVYADSVKGRFTISRDNSKNTLYLQMNSLRAEDTAVYYCAYRR
IGVPRRDEFDIWGQGTMVTVSSASTKGPSVFPLAPSSKSTSGGTAALGCL
VKDYFPEPVTVSWNSGALTSGVHTFPAVLQSSGLYSLSSVVTVPSSSLGT
QTYICNVNHKPSNTKVDKRVEPKSCDKTHTCPPCPAPELLGGPSVFLFPP
KPKDTLMISRTPEVTCVVVDVSHEDPEVKFNWYVDGVEVHNAKTKPREEQ
YNSTYRVVSVLTVLHQDWLNGKEYKCKVSNKALPAPIEKTISKAKGQPRE
PQVYTLPPSREEMTKNQVSLTCLVKGFYPSDIAVEWESNGQPENNYKTTP
PVLDSDGSFFLYSKLTVDKSRWQQGNVFSCSVMHEALHNHYTQKSLSLSP
GKSGGGSEVQLLESGGGLVQPGGSLRLSCAASGFTFSWYVMHWVRQAPGK
CLEWVSSIYPSGGKTSYADSVKGRFTISRDNSKNTLYLQMNSLRAEDTAV
YYCARQRYRGPKYYYYMDVWGQGTTVTVSSGGGGSGGGGSGGGGSGGGGS
DIVMTQSPLSLPVTPGEPASISCRSSQSLLHSNGYNYLDWYLQKPGQSPQ
LLIYLGSNRASGVPDRFSGSGSGTDFTLKISRVEAEDVGVYYCMQALQTP
WTFGCGTKVEIKR
>620I-X0173-E07 (620I-X0177-E01) =
620I-X0136-C11 Germlined + Gene optimized
scFv + disulfide stabilization

(SEQ ID NO: 49)

EVQLLESGGGLVQPGGSLRLSCAASGFTFSHYIMMWVRQAPGKGLEWVSG
IYSSGGITVYADSVKGRFTISRDNSKNTLYLQMNSLRAEDTAVYYCAYRR
IGVPRRDEFDIWGQGTMVTVSSASTKGPSVFPLAPSSKSTSGGTAALGCL
VKDYFPEPVTVSWNSGALTSGVHTFPAVLQSSGLYSLSSVVTVPSSSLGT
QTYICNVNHKPSNTKVDKRVEPKSCDKTHTCPPCPAPELLGGPSVFLFPP
KPKDTLMISRTPEVTCVVVDVSHEDPEVKFNWYVDGVEVHNAKTKPREEQ
YNSTYRVVSVLTVLHQDWLNGKEYKCKVSNKALPAPIEKTISKAKGQPRE
PQVYTLPPSREEMTKNQVSLTCLVKGFYPSDIAVEWESNGQPENNYKTTP
PVLDSDGSFFLYSKLTVDKSRWQQGNVFSCSVMHEALHNHYTQKSLSLSP
GKSGGGSEVQLLESGGGLVQPGGSLRLSCAASGFTFSWYSMHWVRQAPGK
CLEWVSVIYPSGGKTRYADSVKGRFTISRDNSKNTLYLQMNSLRAEDTAV
YYCARQRYRGPKYYYYMDVWGQGTTVTVSSGGGGSGGGGSGGGGSGGGGS
DIVMTQSPLSLPVTPGEPASISCRSSQSLLHSNGYNYLDWYLQKPGQSPQ
LLIYLGSNRASGVPDRFSGSGSGTDFTLKISRVEAEDVGVYYCMQALQTP
WTFGCGTKVEIKR
>620I-X0173-G11 (620I-X0177-G01) =
620I-X0136-G05 Germlined + Gene optimized
scFv + disulfide stabilization

(SEQ ID NO: 50)

EVQLLESGGGLVQPGGSLRLSCAASGFTFSHYIMMWVRQAPGKGLEWVSG
IYSSGGITVYADSVKGRFTISRDNSKNTLYLQMNSLRAEDTAVYYCAYRR
IGVPRRDEFDIWGQGTMVTVSSASTKGPSVFPLAPSSKSTSGGTAALGCL
VKDYFPEPVTVSWNSGALTSGVHTFPAVLQSSGLYSLSSVVTVPSSSLGT
QTYICNVNHKPSNTKVDKRVEPKSCDKTHTCPPCPAPELLGGPSVFLFPP
KPKDTLMISRTPEVTCVVVDVSHEDPEVKFNWYVDGVEVHNAKTKPREEQ
YNSTYRVVSVLTVLHQDWLNGKEYKCKVSNKALPAPIEKTISKAKGQPRE
PQVYTLPPSREEMTKNQVSLTCLVKGFYPSDIAVEWESNGQPENNYKTTP
PVLDSDGSFFLYSKLTVDKSRWQQGNVFSCSVMHEALHNHYTQKSLSLSP
GKSGGGSEVQLLESGGGLVQPGGSLRLSCAASGFTFSHYVMHWVRQAPGK
CLEWVSSIYPSGGLTKYADSVKGRFTISRDNSKNTLYLQMNSLRAEDTAV
YYCARQRYRGPKYYYYMDVWGQGTTVTVSSGGGGSGGGGSGGGGSGGGGS
DIVMTQSPLSLPVTPGEPASISCRSSQSLLHSNGYNYLDWYLQKPGQSPQ
LLIYLGSNRASGVPDRFSGSGSGTDFTLKISRVEAEDVGVYYCMQALQTP
WTFGCGTKVEIKR

### EXAMPLE 4

### Construction and Characterization of Exemplary Bispecific Antibodies with C-terminal Mutations and/or Deletions

[0175] Exemplary bispecific antibodies (620I-X0177-A01, 620I-X0177-C01, 620I-X0177-E01, 620I-X0177-G01) were assessed for production and manufacturability. Samples of the bispecific antibodies were incubated at room temperature for 48 hours at various pH prior to analysis. The samples were then separated on a SDS-PAGE protein gel, as shown, for example, for bispecific antibody 620I-X0177-A01 in FIG. 15, or analyzed by size exclusion chromatography (FIG. 16A-16C). A pH-dependent increase of the 30 kDa and 50 kDa bands and a decrease of the 80 kDa bands were observed under reducing conditions (FIG. 15, lanes 2-6). The appearance of these unexpected bands indicating that the bispecific antibodies were undergoing unanticipated proteolytic cleavage. The appearance of the same 30 kDa species under non-reducing conditions indicated the cleaved species was monomeric (FIG. 15, lanes 6-8). By SEC analysis, peaks were observed at 15.7-16.1 minutes representing the correctly formed bispecific antibodies, at 17 minutes representing DX-2930, and at 22 minutes representing the cleaved single chain antibody (FIG. 16).

[0176] Exemplary bispecific antibodies were designed to remove the IgG1 heavy chain C-terminal lysine residue or mutate the lysine to a glycine residue.

[0177] Provided below are the amino acid sequences of the first polypeptides of the bispecific antibodies including a deletion of the C-terminal lysine residue or a mutation of the C-terminal lysine to a glycine residue of the heavy chain of the first antibody. These first polypeptides may be paired with the light chain of DX-2930.

>620I-X0179-A09 (620I-X0177-A01 with
IgG-C-term Lys deletion)

(SEQ ID NO: 141)

EVQLLESGGGLVQPGGSLRLSCAASGFTFSHYIMMWVRQAPGKGLEWVSG
IYSSGGITVYADSVKGRFTISRDNSKNTLYLQMNSLRAEDTAVYYCAYRR
IGVPRRDEFDIWGQGTMVTVSSASTKGPSVFPLAPSSKSTSGGTAALGCL
VKDYFPEPVTVSWNSGALTSGVHTFPAVLQSSGLYSLSSVVTVPSSSLGT
QTYICNVNHKPSNTKVDKRVEPKSCDKTHTCPPCPAPELLGGPSVFLFPP
KPKDTLMISRTPEVTCVVVDVSHEDPEVKFNWYVDGVEVHNAKTKPREEQ
YNSTYRVVSVLTVLHQDWLNGKEYKCKVSNKALPAPIEKTISKAKGQPRE
PQVYTLPPSREEMTKNQVSLTCLVKGFYPSDIAVEWESNGQPENNYKTTP
PVLDSDGSFFLYSKLTVDKSRWQQGNVFSCSVMHEALHNHYTQKSLSLSP
GSGGGSEVQLLESGGGLVQPGGSLRLSCAASGFTFSQYVMHWVRQAPGKC
LEWVSSIWPSGGHTRYADSVKGRFTISRDNSKNTLYLQMNSLRAEDTAVY
YCARQRYRGPKYYYYMDVWGQGTTVTVSSGGGGSGGGGSGGGGSGGGGSD
IVMTQSPLSLPVTPGEPASISCRSSQSLLHSNGYNYLDWYLQKPGQSPQL
LIYLGSNRASGVPDRFSGSGSGTDFTLKISRVEAEDVGVYYCMQALQTPW
TFGCGTKVEIKR
>620I-X0179-C01 (620I-X0177-A01 with
IgG-C-term Lys mutation to Gly)

(SEQ ID NO: 142)

EVQLLESGGGLVQPGGSLRLSCAASGFTFSHYIMMWVRQAPGKGLEWVSG
IYSSGGITVYADSVKGRFTISRDNSKNTLYLQMNSLRAEDTAVYYCAYRR
IGVPRRDEFDIWGQGTMVTVSSASTKGPSVFPLAPSSKSTSGGTAALGCL
VKDYFPEPVTVSWNSGALTSGVHTFPAVLQSSGLYSLSSVVTVPSSSLGT
QTYICNVNHKPSNTKVDKRVEPKSCDKTHTCPPCPAPELLGGPSVFLFPP
KPKDTLMISRTPEVTCVVVDVSHEDPEVKFNWYVDGVEVHNAKTKPREEQ
YNSTYRVVSVLTVLHQDWLNGKEYKCKVSNKALPAPIEKTISKAKGQPRE
PQVYTLPPSREEMTKNQVSLTCLVKGFYPSDIAVEWESNGQPENNYKTTP
PVLDSDGSFFLYSKLTVDKSRWQQGNVFSCSVMHEALHNHYTQKSLSLSP
GGSGGGSEVQLLESGGGLVQPGGSLRLSCAASGFTFSQYVMHWVRQAPGK
CLEWVSSIWPSGGHTRYADSVKGRFTISRDNSKNTLYLQMNSLRAEDTAV
YYCARQRYRGPKYYYYMDVWGQGTTVTVSSGGGGSGGGGSGGGGSGGGGS
DIVMTQSPLSLPVTPGEPASISCRSSQSLLHSNGYNYLDWYLQKPGQSPQ
LLIYLGSNRASGVPDRFSGSGSGTDFTLKISRVEAEDVGVYYCMQALQTP
WTFGCGTKVEIKR
>620I-X0179-E05 (620I-X0177-C01 with
IgG-C-term Lys deletion)

(SEQ ID NO: 143)

EVQLLESGGGLVQPGGSLRLSCAASGFTFSHYIMMWVRQAPGKGLEWVSG
IYSSGGITVYADSVKGRFTISRDNSKNTLYLQMNSLRAEDTAVYYCAYRR
IGVPRRDEFDIWGQGTMVTVSSASTKGPSVFPLAPSSKSTSGGTAALGCL
VKDYFPEPVTVSWNSGALTSGVHTFPAVLQSSGLYSLSSVVTVPSSSLGT
QTYICNVNHKPSNTKVDKRVEPKSCDKTHTCPPCPAPELLGGPSVFLFPP
KPKDTLMISRTPEVTCVVVDVSHEDPEVKFNWYVDGVEVHNAKTKPREEQ
YNSTYRVVSVLTVLHQDWLNGKEYKCKVSNKALPAPIEKTISKAKGQPRE
PQVYTLPPSREEMTKNQVSLTCLVKGFYPSDIAVEWESNGQPENNYKTTP
PVLDSDGSFFLYSKLTVDKSRWQQGNVFSCSVMHEALHNHYTQKSLSLSP
GSGGGSEVQLLESGGGLVQPGGSLRLSCAASGFTFSWYVMHWVRQAPGKC
LEWVSSIYPSGGKTSYADSVKGRFTISRDNSKNTLYLQMNSLRAEDTAVY
YCARQRYRGPKYYYYMDVWGQGTTVTVSSGGGGSGGGGSGGGGSGGGGSD
IVMTQSPLSLPVTPGEPASISCRSSQSLLHSNGYNYLDWYLQKPGQSPQL
LIYLGSNRASGVPDRFSGSGSGTDFTLKISRVEAEDVGVYYCMQALQTPW
TFGCGTKVEIKR
>620I-X0179-G05 (620I-X0177-C01 with
IgG-C-term Lys mutation to Gly)

(SEQ ID NO: 144)

EVQLLESGGGLVQPGGSLRLSCAASGFTFSHYIMMWVRQAPGKGLEWVSG
IYSSGGITVYADSVKGRFTISRDNSKNTLYLQMNSLRAEDTAVYYCAYRR
IGVPRRDEFDIWGQGTMVTVSSASTKGPSVFPLAPSSKSTSGGTAALGCL
VKDYFPEPVTVSWNSGALTSGVHTFPAVLQSSGLYSLSSVVTVPSSSLGT
QTYICNVNHKPSNTKVDKRVEPKSCDKTHTCPPCPAPELLGGPSVFLFPP
KPKDTLMISRTPEVTCVVVDVSHEDPEVKFNWYVDGVEVHNAKTKPREEQ
YNSTYRVVSVLTVLHQDWLNGKEYKCKVSNKALPAPIEKTISKAKGQPRE
PQVYTLPPSREEMTKNQVSLTCLVKGFYPSDIAVEWESNGQPENNYKTTP
PVLDSDGSFFLYSKLTVDKSRWQQGNVFSCSVMHEALHNHYTQKSLSLSP
GGSGGGSEVQLLESGGGLVQPGGSLRLSCAASGFTFSWYVMHWVRQAPGK
CLEWVSSIYPSGGKTSYADSVKGRFTISRDNSKNTLYLQMNSLRAEDTAV
YYCARQRYRGPKYYYYMDVWGQGTTVTVSSGGGGSGGGGSGGGGSGGGGS
DIVMTQSPLSLPVTPGEPASISCRSSQSLLHSNGYNYLDWYLQKPGQSPQ
LLIYLGSNRASGVPDRFSGSGSGTDFTLKISRVEAEDVGVYYCMQALQTP
WTFGCGTKVEIKR
>620I-X0180-A05 (620I-X0177-G01 with
IgG-C-term Lys deletion)

(SEQ ID NO: 145)

EVQLLESGGGLVQPGGSLRLSCAASGFTFSHYIMMWVRQAPGKGLEWVSG
IYSSGGITVYADSVKGRFTISRDNSKNTLYLQMNSLRAEDTAVYYCAYRR
IGVPRRDEFDIWGQGTMVTVSSASTKGPSVFPLAPSSKSTSGGTAALGCL
VKDYFPEPVTVSWNSGALTSGVHTFPAVLQSSGLYSLSSVVTVPSSSLGT
QTYICNVNHKPSNTKVDKRVEPKSCDKTHTCPPCPAPELLGGPSVFLFPP
KPKDTLMISRTPEVTCVVVDVSHEDPEVKFNWYVDGVEVHNAKTKPREEQ
YNSTYRVVSVLTVLHQDWLNGKEYKCKVSNKALPAPIEKTISKAKGQPRE
PQVYTLPPSREEMTKNQVSLTCLVKGFYPSDIAVEWESNGQPENNYKTTP
PVLDSDGSFFLYSKLTVDKSRWQQGNVFSCSVMHEALHNHYTQKSLSLSP
GSGGGSEVQLLESGGGLVQPGGSLRLSCAASGFTFSHYVMHWVRQAPGKC
LEWVSSIYPSGGLTKYADSVKGRFTISRDNSKNTLYLQMNSLRAEDTAVY
YCARQRYRGPKYYYYMDVWGQGTTVTVSSGGGGSGGGGSGGGGSGGGGSD
IVMTQSPLSLPVTPGEPASISCRSSQSLLHSNGYNYLDWYLQKPGQSPQL
LIYLGSNRASGVPDRFSGSGSGTDFTLKISRVEAEDVGVYYCMQALQTPW
TFGCGTKVEIKR
>620I-X0180-C11 (620I-X0177-G01 with
IgG-C-term Lys mutation to Gly)

(SEQ ID NO: 146)

EVQLLESGGGLVQPGGSLRLSCAASGFTFSHYIMMWVRQAPGKGLEWVSG
IYSSGGITVYADSVKGRFTISRDNSKNTLYLQMNSLRAEDTAVYYCAYRR
IGVPRRDEFDIWGQGTMVTVSSASTKGPSVFPLAPSSKSTSGGTAALGCL
VKDYFPEPVTVSWNSGALTSGVHTFPAVLQSSGLYSLSSVVTVPSSSLGT
QTYICNVNHKPSNTKVDKRVEPKSCDKTHTCPPCPAPELLGGPSVFLFPP
KPKDTLMISRTPEVTCVVVDVSHEDPEVKFNWYVDGVEVHNAKTKPREEQ
YNSTYRVVSVLTVLHQDWLNGKEYKCKVSNKALPAPIEKTISKAKGQPRE
PQVYTLPPSREEMTKNQVSLTCLVKGFYPSDIAVEWESNGQPENNYKTTP
PVLDSDGSFFLYSKLTVDKSRWQQGNVFSCSVMHEALHNHYTQKSLSLSP
GGSGGGSEVQLLESGGGLVQPGGSLRLSCAASGFTFSHYVMHWVRQAPGK
CLEWVSSIYPSGGLTKYADSVKGRFTISRDNSKNTLYLQMNSLRAEDTAV
YYCARQRYRGPKYYYYMDVWGQGTTVTVSSGGGGSGGGGSGGGGSGGGGS
DIVMTQSPLSLPVTPGEPASISCRSSQSLLHSNGYNYLDWYLQKPGQSPQ
LLIYLGSNRASGVPDRFSGSGSGTDFTLKISRVEAEDVGVYYCMQALQTP
WTFGCGTKVEIKR
>620I-X0180-E07 (620I-X0177-E01 with
IgG-C-term Lys deletion)

(SEQ ID NO: 147)

EVQLLESGGGLVQPGGSLRLSCAASGFTFSHYIMMWVRQAPGKGLEWVSG
IYSSGGITVYADSVKGRFTISRDNSKNTLYLQMNSLRAEDTAVYYCAYRR
IGVPRRDEFDIWGQGTMVTVSSASTKGPSVFPLAPSSKSTSGGTAALGCL
VKDYFPEPVTVSWNSGALTSGVHTFPAVLQSSGLYSLSSVVTVPSSSLGT
QTYICNVNHKPSNTKVDKRVEPKSCDKTHTCPPCPAPELLGGPSVFLFPP
KPKDTLMISRTPEVTCVVVDVSHEDPEVKFNWYVDGVEVHNAKTKPREEQ
YNSTYRVVSVLTVLHQDWLNGKEYKCKVSNKALPAPIEKTISKAKGQPRE
PQVYTLPPSREEMTKNQVSLTCLVKGFYPSDIAVEWESNGQPENNYKTTP
PVLDSDGSFFLYSKLTVDKSRWQQGNVFSCSVMHEALHNHYTQKSLSLSP
GSGGGSEVQLLESGGGLVQPGGSLRLSCAASGFTFSWYSMHWVRQAPGKC
LEWVSVIYPSGGKTRYADSVKGRFTISRDNSKNTLYLQMNSLRAEDTAVY
YCARQRYRGPKYYYYMDVWGQGTTVTVSSGGGGSGGGGSGGGGSGGGGSD
IVMTQSPLSLPVTPGEPASISCRSSQSLLHSNGYNYLDWYLQKPGQSPQL
LIYLGSNRASGVPDRFSGSGSGTDFTLKISRVEAEDVGVYYCMQALQTPW
TFGCGTKVEIKR
>620I-X0180-G03 (620I-X0177-E01 with
IgG-C-term Lys mutation to Glycine)

(SEQ ID NO: 148)

EVQLLESGGGLVQPGGSLRLSCAASGFTFSHYIMMWVRQAPGKGLEWVSG
IYSSGGITVYADSVKGRFTISRDNSKNTLYLQMNSLRAEDTAVYYCAYRR
IGVPRRDEFDIWGQGTMVTVSSASTKGPSVFPLAPSSKSTSGGTAALGCL
VKDYFPEPVTVSWNSGALTSGVHTFPAVLQSSGLYSLSSVVTVPSSSLGT
QTYICNVNHKPSNTKVDKRVEPKSCDKTHTCPPCPAPELLGGPSVFLFPP
KPKDTLMISRTPEVTCVVVDVSHEDPEVKFNWYVDGVEVHNAKTKPREEQ
YNSTYRVVSVLTVLHQDWLNGKEYKCKVSNKALPAPIEKTISKAKGQPRE
PQVYTLPPSREEMTKNQVSLTCLVKGFYPSDIAVEWESNGQPENNYKTTP
PVLDSDGSFFLYSKLTVDKSRWQQGNVFSCSVMHEALHNHYTQKSLSLSP
GGSGGGSEVQLLESGGGLVQPGGSLRLSCAASGFTFSWYSMHWVRQAPGK
CLEWVSVIYPSGGKTRYADSVKGRFTISRDNSKNTLYLQMNSLRAEDTAV
YYCARQRYRGPKYYYYMDVWGQGTTVTVSSGGGGSGGGGSGGGGSGGGGS
DIVMTQSPLSLPVTPGEPASISCRSSQSLLHSNGYNYLDWYLQKPGQSPQ
LLIYLGSNRASGVPDRFSGSGSGTDFTLKISRVEAEDVGVYYCMQALQTP
WTFGCGTKVEIKR

[0178] Each of the exemplary bispecific antibodies including a deletion of the C-terminal lysine residue or a mutation of the C-terminal lysine to a glycine residue of the heavy chain of the first antibody was assessed by separating the bispecific antibodies on an SDS-PAGE gel at t=0 (FIG. 17). Samples of each of the exemplary bispecific antibodies were also concentrated using an Amicon 10 kDa molecular weight cut-off spin filter to approximately 10 mg/mL in 50 mM Hepes, pH 7.5 and incubated at room temperature for 48 hours. The samples were then assessed by SDS-PAGE gel (FIG. 18). In each case, deletion or mutation of the C-terminal lysine reduced or eliminated cleavage of the scFv from the bispecific antibody.

[0179] Samples of the bispecific were also assessed by analytical size exclusion chromatography, demonstrating that the deletion or mutation of the C-terminal lysine reduced cleavage of the bispecific antibodies (FIGS. 19-20). Cleavage of the bispecific antibodies was also assessed by incubating the antibodies with EndoLysC at 37° C. for 1 hour followed by separation on an SDS-PAGE gel (FIG. 21). The protein bands at 50 kDa corresponded to the Fab portion of DX-2930, and the bands at 100 kDa corresponded to a homodimer of Fc-scFv, further indicating that the deletion or mutation of the heavy chain C-terminal lysine reduced cleavage of the bispecific antibodies.

[0180] The exemplary bispecific antibodies including a deletion or mutation of the C-terminal lysine were also characterized for the ability to inhibit pKal, FXIIa, and activated plasma compared to DX-2930 and DX-4012 control (Table 1, FIG. 22-24). Each of the exemplary bispecific antibodies was found to be functionally equivalent to the parent bispecific antibody (the bispecific antibody that does not comprise the deletion or mutation of the IgG1 heavy chain C-terminal lysine). The mutation may reduce charge heterogeneity of the bispecific antibody.

TABLE 6
Summary of bispecific antibodies used in the biochemical assays, as well as DX-2930 and DX-4012 control IgGs.
Assays were performed to measure inhibition of pKal, inhibition of FXIIa, and inhibition of activated plasma.

| | | | IgG-C-term | |
|---|---|---|---|---|
| R-name | X-name (or DX-) | Parent Bispecific | Lys alteration | FXII scFv |
| 620I-R0052-A01 | 620I-X0179-A09 | 620I-X0177-A01 | Lys-Delete | 559C-M0192-H11 GL/GO/Disulfide H4L scFv |
| 620I-R0052-C01 | 620I-X0179-C01 | 620I-X0177-A01 | Lys-Gly | 559C-M0192-H11 GL/GO/Disulfide H4L scFv |
| 620I-R0052-E01 | 620I-X0179-E05 | 620I-X0177-C01 | Lys-Delete | 559C-M0192-F06 GL/GO/Disulfide H4L scFv |
| 620I-R0052-G01 | 620I-X0179-G05 | 620I-X0177-C01 | Lys-Gly | 559C-M0192-F06 GL/GO/Disulfide H4L scFv |
| 620I-R0052-E03 | 620I-X0180-E07 | 620I-X0177-E01 | Lys-Delete | 559C-M0191-E09 GL/GO/Disulfide H4L scFv |
| 620I-R0052-G03 | 620I-X0180-G03 | 620I-X0177-E01 | Lys-Gly | 559C-M0191-E09 GL/GO/Disulfide H4L scFv |
| 620I-R0052-A03 | 620I-X0180-A05 | 620I-X0177-G01 | Lys-Delete | 559C-M0192-A01 GL/GO/Disulfide H4L scFv |
| 620I-R0052-C03 | 620I-X0180-C11 | 620I-X0177-G01 | Lys-Gly | 559C-M0192-A01 GL/GO/Disulfide H4L scFv |
| | DX-2930 | | | |
| | DX-4012 | | | |
| | | pKal | FXIIa | activated |
| | | inhibition | inhibition | plasma inhibition |
| | | Ki, app | Ki, app | IC50/Ki, app |
| | R-name | (pM) | (pM) | (nM) |
| | 620I-R0052-A01 | 225 | 90 | 7.6 (Ki) |
| | 620I-R0052-C01 | 243 | 108 | 7.8 (Ki) |
| | 620I-R0052-E01 | 203 | 99 | 7.4 (Ki) |
| | 620I-R0052-G01 | 226 | 52 | 8.1 (Ki) |
| | 620I-R0052-E03 | 243 | 92 | 3.0 (Ki) |
| | 620I-R0052-G03 | 208 | 71 | 2.8 (Ki) |
| | 620I-R0052-A03 | 254 | 116 | 7.3 (Ki) |
| | 620I-R0052-C03 | 232 | 140 | 9.2 (Ki) |
| | | 127, 131, 151 | n/a | 90, 68, 74, 74, 66 (IC50) |
| | | n/a | 8, 2, 9 | 279, 291 (IC50) |

[0181] Alternatively or in addition, the Lys-Arg (KR) motif at the C-terminus of the anti-FXIIa scFvs noted above can be removed. Provided below are the amino acid sequences of the exemplary bispecific antibody polypeptides including a deletion of the C-terminal lysine residue or a mutation of the C-terminal lysine to a glycine residue of the heavy chain of the first antibody and a deletion of the C-terminal lysine-arginine residues of the scFv.

>620I-X0186-C05 (620I-X0177-A01 with
IgG-C-term Lys deletion and C-terminal KR removal)

(SEQ ID NO: 151)

EVQLLESGGGLVQPGGSLRLSCAASGFTFSHYIMMWVRQAPGKGLEWVSG
IYSSGGITVYADSVKGRFTISRDNSKNTLYLQMNSLRAEDTAVYYCAYRR
IGVPRRDEFDIWGQGTMVTVSSASTKGPSVFPLAPSSKSTSGGTAALGCL
VKDYFPEPVTVSWNSGALTSGVHTFPAVLQSSGLYSLSSVVTVPSSSLGT
QTYICNVNHKPSNTKVDKRVEPKSCDKTHTCPPCPAPELLGGPSVFLFPP
KPKDTLMISRTPEVTCVVVDVSHEDPEVKFNWYVDGVEVHNAKTKPREEQ
YNSTYRVVSVLTVLHQDWLNGKEYKCKVSNKALPAPIEKTISKAKGQPRE
PQVYTLPPSREEMTKNQVSLTCLVKGFYPSDIAVEWESNGQPENNYKTTP
PVLDSDGSFFLYSKLTVDKSRWQQGNVFSCSVMHEALHNHYTQKSLSLSP
GSGGGSEVQLLESGGGLVQPGGSLRLSCAASGFTFSQYVMHWVRQAPGKC
LEWVSSIWPSGGHTRYADSVKGRFTISRDNSKNTLYLQMNSLRAEDTAVY
YCARQRYRGPKYYYYMDVWGQGTTVTVSSGGGGSGGGGSGGGGSGGGGSD
IVMTQSPLSLPVTPGEPASISCRSSQSLLHSNGYNYLDWYLQKPGQSPQL
LIYLGSNRASGVPDRFSGSGSGTDFTLKISRVEAEDVGVYYCMQALQTPW
TFGCGTKVEI
>620I-X0185-C01 (620I-X0177-A01 with IgG-C-term
Lys mutation to Glycine and C-terminal KR removal)

(SEQ ID NO: 152)

EVQLLESGGGLVQPGGSLRLSCAASGFTFSHYIMMWVRQAPGKGLEWVSG
IYSSGGITVYADSVKGRFTISRDNSKNTLYLQMNSLRAEDTAVYYCAYRR
IGVPRRDEFDIWGQGTMVTVSSASTKGPSVFPLAPSSKSTSGGTAALGCL
VKDYFPEPVTVSWNSGALTSGVHTFPAVLQSSGLYSLSSVVTVPSSSLGT
QTYICNVNHKPSNTKVDKRVEPKSCDKTHTCPPCPAPELLGGPSVFLFPP
KPKDTLMISRTPEVTCVVVDVSHEDPEVKFNWYVDGVEVHNAKTKPREEQ
YNSTYRVVSVLTVLHQDWLNGKEYKCKVSNKALPAPIEKTISKAKGQPRE
PQVYTLPPSREEMTKNQVSLTCLVKGFYPSDIAVEWESNGQPENNYKTTP
PVLDSDGSFFLYSKLTVDKSRWQQGNVFSCSVMHEALHNHYTQKSLSLSP
GGSGGGSEVQLLESGGGLVQPGGSLRLSCAASGFTFSQYVMHWVRQAPGK
CLEWVSSIWPSGGHTRYADSVKGRFTISRDNSKNTLYLQMNSLRAEDTAV
YYCARQRYRGPKYYYYMDVWGQGTTVTVSSGGGGSGGGGSGGGGSGGGGS
DIVMTQSPLSLPVTPGEPASISCRSSQSLLHSNGYNYLDWYLQKPGQSPQ
LLIYLGSNRASGVPDRFSGSGSGTDFTLKISRVEAEDVGVYYCMQALQTP
WTFGCGTKVEI
>620I-X0186-E05 (620I-X0177-C01 with IgG-C-term
Lys deletion and C-terminal KR removal)

(SEQ ID NO: 153)

EVQLLESGGGLVQPGGSLRLSCAASGFTFSHYIMMWVRQAPGKGLEWVSG
IYSSGGITVYADSVKGRFTISRDNSKNTLYLQMNSLRAEDTAVYYCAYRR
IGVPRRDEFDIWGQGTMVTVSSASTKGPSVFPLAPSSKSTSGGTAALGCL
VKDYFPEPVTVSWNSGALTSGVHTFPAVLQSSGLYSLSSVVTVPSSSLGT
QTYICNVNHKPSNTKVDKRVEPKSCDKTHTCPPCPAPELLGGPSVFLFPP
KPKDTLMISRTPEVTCVVVDVSHEDPEVKFNWYVDGVEVHNAKTKPREEQ
YNSTYRVVSVLTVLHQDWLNGKEYKCKVSNKALPAPIEKTISKAKGQPRE
PQVYTLPPSREEMTKNQVSLTCLVKGFYPSDIAVEWESNGQPENNYKTTP
PVLDSDGSFFLYSKLTVDKSRWQQGNVFSCSVMHEALHNHYTQKSLSLSP
GSGGGSEVQLLESGGGLVQPGGSLRLSCAASGFTFSWYVMHWVRQAPGKC
LEWVSSIYPSGGKTSYADSVKGRFTISRDNSKNTLYLQMNSLRAEDTAVY
YCARQRYRGPKYYYYMDVWGQGTTVTVSSGGGGSGGGGSGGGGSGGGGSD
IVMTQSPLSLPVTPGEPASISCRSSQSLLHSNGYNYLDWYLQKPGQSPQL
LIYLGSNRASGVPDRFSGSGSGTDFTLKISRVEAEDVGVYYCMQALQTPW
TFGCGTKVEI
>620I-X0185-E01 (620I-X0177-C01 with IgG-C-term
Lys mutation to Glycine and C-terminal KR removal)

(SEQ ID NO: 154)

EVQLLESGGGLVQPGGSLRLSCAASGFTFSHYIMMWVRQAPGKGLEWVSG
IYSSGGITVYADSVKGRFTISRDNSKNTLYLQMNSLRAEDTAVYYCAYRR
IGVPRRDEFDIWGQGTMVTVSSASTKGPSVFPLAPSSKSTSGGTAALGCL
VKDYFPEPVTVSWNSGALTSGVHTFPAVLQSSGLYSLSSVVTVPSSSLGT
QTYICNVNHKPSNTKVDKRVEPKSCDKTHTCPPCPAPELLGGPSVFLFPP
KPKDTLMISRTPEVTCVVVDVSHEDPEVKFNWYVDGVEVHNAKTKPREEQ
YNSTYRVVSVLTVLHQDWLNGKEYKCKVSNKALPAPIEKTISKAKGQPRE
PQVYTLPPSREEMTKNQVSLTCLVKGFYPSDIAVEWESNGQPENNYKTTP
PVLDSDGSFFLYSKLTVDKSRWQQGNVFSCSVMHEALHNHYTQKSLSLSP
GGSGGGSEVQLLESGGGLVQPGGSLRLSCAASGFTFSWYVMHWVRQAPGK
CLEWVSSIYPSGGKTSYADSVKGRFTISRDNSKNTLYLQMNSLRAEDTAV
YYCARQRYRGPKYYYYMDVWGQGTTVTVSSGGGGSGGGGSGGGGSGGGGS
DIVMTQSPLSLPVTPGEPASISCRSSQSLLHSNGYNYLDWYLQKPGQSPQ
LLIYLGSNRASGVPDRFSGSGSGTDFTLKISRVEAEDVGVYYCMQALQTP
WTFGCGTKVEI
>620I-X0186-A05 (620I-X0177-G01 with IgG-C-term
Lys deletion and C-terminal KR removal)

(SEQ ID NO: 155)

EVQLLESGGGLVQPGGSLRLSCAASGFTFSHYIMMWVRQAPGKGLEWVSG
IYSSGGITVYADSVKGRFTISRDNSKNTLYLQMNSLRAEDTAVYYCAYRR
IGVPRRDEFDIWGQGTMVTVSSASTKGPSVFPLAPSSKSTSGGTAALGCL
VKDYFPEPVTVSWNSGALTSGVHTFPAVLQSSGLYSLSSVVTVPSSSLGT
QTYICNVNHKPSNTKVDKRVEPKSCDKTHTCPPCPAPELLGGPSVFLFPP
KPKDTLMISRTPEVTCVVVDVSHEDPEVKFNWYVDGVEVHNAKTKPREEQ
YNSTYRVVSVLTVLHQDWLNGKEYKCKVSNKALPAPIEKTISKAKGOPRE
PQVYTLPPSREEMTKNQVSLTCLVKGFYPSDIAVEWESNGQPENNYKTTP
PVLDSDGSFFLYSKLTVDKSRWQQGNVFSCSVMHEALHNHYTQKSLSLSP
GSGGGSEVQLLESGGGLVQPGGSLRLSCAASGFTFSHYVMHWVRQAPGKC
LEWVSSIYPSGGLTKYADSVKGRFTISRDNSKNTLYLQMNSLRAEDTAVY
YCARQRYRGPKYYYYMDVWGQGTTVTVSSGGGGSGGGGSGGGGSGGGGSD
IVMTQSPLSLPVTPGEPASISCRSSQSLLHSNGYNYLDWYLQKPGQSPQL
LIYLGSNRASGVPDRFSGSGSGTDFTLKISRVEAEDVGVYYCMQALQTPW
TFGCGTKVEI
>620I-X0185-A03 (620I-X0177-G01 with IgG-C-term
Lys mutation to Glycine and C-terminal KR removal)

(SEQ ID NO: 156)

EVQLLESGGGLVQPGGSLRLSCAASGFTFSHYIMMWVRQAPGKGLEWVSG
IYSSGGITVYADSVKGRFTISRDNSKNTLYLQMNSLRAEDTAVYYCAYRR
IGVPRRDEFDIWGQGTMVTVSSASTKGPSVFPLAPSSKSTSGGTAALGCL
VKDYFPEPVTVSWNSGALTSGVHTFPAVLQSSGLYSLSSVVTVPSSSLGT
QTYICNVNHKPSNTKVDKRVEPKSCDKTHTCPPCPAPELLGGPSVFLFPP
KPKDTLMISRTPEVTCVVVDVSHEDPEVKFNWYVDGVEVHNAKTKPREEQ
YNSTYRVVSVLTVLHQDWLNGKEYKCKVSNKALPAPIEKTISKAKGQPRE
PQVYTLPPSREEMTKNQVSLTCLVKGFYPSDIAVEWESNGQPENNYKTTP
PVLDSDGSFFLYSKLTVDKSRWQQGNVFSCSVMHEALHNHYTQKSLSLSP
GGSGGGSEVQLLESGGGLVQPGGSLRLSCAASGFTFSHYVMHWVRQAPGK
CLEWVSSIYPSGGLTKYADSVKGRFTISRDNSKNTLYLQMNSLRAEDTAV
YYCARQRYRGPKYYYYMDVWGQGTTVTVSSGGGGSGGGGSGGGGSGGGGS
DIVMTQSPLSLPVTPGEPASISCRSSQSLLHSNGYNYLDWYLQKPGQSPQ
LLIYLGSNRASGVPDRFSGSGSGTDFTLKISRVEAEDVGVYYCMQALQTP
WTFGCGTKVEI
>620I-X0186-G07 (620I-X0177-E01 with IgG-C-term
Lys deletion and C-terminal KR removal)

(SEQ ID NO: 157)

EVQLLESGGGLVQPGGSLRLSCAASGFTFSHYIMMWVRQAPGKGLEWVSG
IYSSGGITVYADSVKGRFTISRDNSKNTLYLQMNSLRAEDTAVYYCAYRR
IGVPRRDEFDIWGQGTMVTVSSASTKGPSVFPLAPSSKSTSGGTAALGCL
VKDYFPEPVTVSWNSGALTSGVHTFPAVLQSSGLYSLSSVVTVPSSSLGT
QTYICNVNHKPSNTKVDKRVEPKSCDKTHTCPPCPAPELLGGPSVFLFPP
KPKDTLMISRTPEVTCVVVDVSHEDPEVKFNWYVDGVEVHNAKTKPREEQ
YNSTYRVVSVLTVLHQDWLNGKEYKCKVSNKALPAPIEKTISKAKGQPRE
PQVYTLPPSREEMTKNQVSLTCLVKGFYPSDIAVEWESNGQPENNYKTTP
PVLDSDGSFFLYSKLTVDKSRWQQGNVFSCSVMHEALHNHYTQKSLSLSP
GSGGGSEVQLLESGGGLVQPGGSLRLSCAASGFTFSWYSMHWVRQAPGKC
LEWVSVIYPSGGKTRYADSVKGRFTISRDNSKNTLYLQMNSLRAEDTAVY
YCARQRYRGPKYYYYMDVWGQGTTVTVSSGGGGSGGGGSGGGGSGGGGSD
IVMTQSPLSLPVTPGEPASISCRSSQSLLHSNGYNYLDWYLQKPGQSPQL
LIYLGSNRASGVPDRFSGSGSGTDFTLKISRVEAEDVGVYYCMQALQTPW
TFGCGTKVEI
>620I-X0185-G01 (620I-X0177-E01 with IgG-C-term
Lys mutation to Glycine and C-terminal KR removal)

(SEQ ID NO: 158)

EVQLLESGGGLVQPGGSLRLSCAASGFTFSHYIMMWVRQAPGKGLEWVSG
IYSSGGITVYADSVKGRFTISRDNSKNTLYLQMNSLRAEDTAVYYCAYRR
IGVPRRDEFDIWGQGTMVTVSSASTKGPSVFPLAPSSKSTSGGTAALGCL
VKDYFPEPVTVSWNSGALTSGVHTFPAVLQSSGLYSLSSVVTVPSSSLGT
QTYICNVNHKPSNTKVDKRVEPKSCDKTHTCPPCPAPELLGGPSVFLFPP
KPKDTLMISRTPEVTCVVVDVSHEDPEVKFNWYVDGVEVHNAKTKPREEQ
YNSTYRVVSVLTVLHQDWLNGKEYKCKVSNKALPAPIEKTISKAKGQPRE
PQVYTLPPSREEMTKNQVSLTCLVKGFYPSDIAVEWESNGQPENNYKTTP
PVLDSDGSFFLYSKLTVDKSRWQQGNVFSCSVMHEALHNHYTQKSLSLSP
GGSGGGSEVQLLESGGGLVQPGGSLRLSCAASGFTFSWYSMHWVRQAPGK
CLEWVSVIYPSGGKTRYADSVKGRFTISRDNSKNTLYLQMNSLRAEDTAV
YYCARQRYRGPKYYYYMDVWGQGTTVTVSSGGGGSGGGGSGGGGSGGGGS
DIVMTQSPLSLPVTPGEPASISCRSSQSLLHSNGYNYLDWYLQKPGQSPQ
LLIYLGSNRASGVPDRFSGSGSGTDFTLKISRVEAEDVGVYYCMQALQTP
WTFGCGTKVEI

[0182] The above-listed polypeptides can be paired with the light chain of DX-2930 to form bispecific antibodies, which are also within the scope of the present disclosure.

### Other Embodiments

[0183] All of the features disclosed in this specification may be combined in any combination. Each feature disclosed in this specification may be replaced by an alternative feature serving the same, equivalent, or similar purpose. Thus, unless expressly stated otherwise, each feature disclosed is only an example of a generic series of equivalent or similar features.

[0184] From the above description, one skilled in the art can easily ascertain the essential characteristics of the present invention, and without departing from the spirit and scope thereof, can make various changes and modifications of the invention to adapt it to various usages and conditions. Thus, other embodiments are also within the claims.

1. A bispecific antibody, comprising:
a first polypeptide that comprises a light chain of a first antibody, the light chain comprising a light chain variable region (V_{L}) and a light chain constant region (C_{L}); and
a second polypeptide that comprises a heavy chain of the first antibody, the heavy chain comprising a heavy chain variable region (V_{H}) and a heavy chain constant region (C_{H}),
wherein the first polypeptide or the second polypeptide further comprises a second antibody, which is a single chain antibody and is fused to the C-terminus of either the first polypeptide or the second polypeptide; and
wherein one of the first and second antibodies binds plasma kallikrein (pKal) and the other antibody binds Factor XII.

2. The bispecific antibody of claim 1, wherein the second antibody is fused to the C-terminus of the second polypeptide.

3. The bispecific antibody of claim 1, wherein the first antibody binds pKal and the second antibody binds Factor XII.

4. The bispecific antibody of claim 1, wherein one of the first and second antibodies binds active plasma kallikrein (pKal) and/or the other antibody binds active Factor XII (FXIIa).

5. The bispecific antibody of claim 1, wherein the first antibody is an IgG.

6. The bispecific antibody of claim 5, wherein the IgG comprises a mutated heavy chain, which, as compared with the wild-type counterpart, has the C-terminal lysine residue deleted or mutated.

7. The bispecific antibody of claim 6, wherein the heavy chain of the first antibody contains a C-terminal glycine residue, instead of a lysine residue.

8. The bispecific antibody of claim 1, wherein the second antibody does not contain a KR motif at its C-terminus.

9. The bispecific antibody of claim 1, wherein the bispecific antibody is tetravalent.

10. The bispecific antibody of claim 2, wherein the second polypeptide comprises a peptide linker between the heavy chain of the first antibody and the second antibody.

11. (canceled)

12. The bispecific antibody of claim 1, wherein the C_{L} is a kappa light chain or a lambda light chain.

13. (canceled)

14. The bispecific antibody of claim 1, wherein in the second antibody, the V_{H} is fused to the N-terminus of the V_{L} or fused to the C-terminus of the V_{L}.

15. (canceled)

16. The bispecific antibody of claim 10, wherein the second antibody comprises a peptide linker between the V_{H} and V_{L} regions.

17. (canceled)

18. The bispecific antibody of claim 1, wherein a disulfide bond is formed between the V_{H} chain and the V_{L} chain in the second antibody.

19. The bispecific antibody of claim 18, wherein the disulfide bond is formed between C₄₄ in the V_{H} chain and C₁₀₀ in the V_{L} chain.

20. The bispecific antibody of claim 1, wherein the V_{H} of the first antibody has the same complementarity determining regions (CDRs) as those in SEQ ID NO:
and/or wherein the VL of the first antibody has the same CDRs as those in SEQ ID NO: 2.

21. The bispecific antibody of claim 20, wherein the V_{H} of the first antibody comprises the amino acid sequence of SEQ ID NO: 1; and/or wherein the VL of the first antibody comprises the amino acid sequence of SEQ ID NO: 2.

22. The bispecific antibody of claim 21, wherein the heavy chain of the first antibody comprises the amino acid sequence of residues 20-470 of SEQ ID NO: 9.

23. The bispecific antibody of claim 22, wherein the heavy chain of the first antibody comprises the amino acid sequence of SEQ ID NO: 9, 149, or 150.

24.-25. (canceled)

26. The bispecific antibody of claim 1, wherein the V_{H} of the second antibody has the same CDRs as those in any of SEQ ID NOs: 3, 4, and 123-126; and/or wherein the VL of the second antibody has the same CDRs as those in any of SEQ ID NOs: 5- 8 and 127.

27. The bispecific antibody of claim 26, wherein the V_{H} of the second antibody comprises any of the amino acid sequences of SEQ ID NOs: 3, 4, and 123-126; and/or wherein the VL of the second antibody comprises residues 1-111 of any one of the amino acid sequences of SEQ ID NOs: 5-8 and 127.

28.-30. (canceled)

31. The bispecific antibody of claim 1, wherein the first polypeptide comprises the amino acid sequence of SEQ ID NO: 10 and the second polypeptide comprises the amino acid sequence selected from the group consisting of SEQ ID NOs: 11-20, 47-122, 141-148, and 151-158.

32.-33. (canceled)

34. A bispecific antibody, which comprises a first antibody binding to plasma kallikrein (pKal) and a second antibody binding to Factor XIIa.

35.-36. (canceled)

37. The bispecific antibody of claim 34, wherein the second antibody comprises a V_{H} chain that comprises the same CDRs as those in any of SEQ ID NOs: 3, 4, and 123-126, and/or a V_{L} chain that comprises the same CDRs as those in any of SEQ ID NOs: 5-8 and 127.

38. (canceled)

39. An isolated nucleic acid or nucleic acid set, comprising a first nucleotide sequence encoding the first polypeptide and a second nucleotide sequence encoding the second polypeptide, wherein the first polypeptide and the second polypeptide are set forth in claim 1.

40.-45. (canceled)

46. A pharmaceutical composition comprising (i) a bispecific antibody of claim 1, and (ii) a pharmaceutically acceptable carrier.

47. A method for treating a disease associated with the contact activation system, comprising administering to a subject in need thereof an effective amount of the pharmaceutical composition of claim 46.

48. (canceled)

49. A host cell or host cell set, comprising the vector or vector set of claim 39.

50. A method for preparing a bispecific antibody, comprising:
culturing the host cell or host cell set of claim 49 under conditions allowing for expression of the first polypeptide and the second polypeptide; and
isolating the bispecific antibody that comprises the first polypeptide and the second polypeptide.

51.-54. (canceled)

The application's sequence listing, which the Patent Office published only in electronic form, follows.

SEQUENCE LISTING (158 sequences)

SEQ ID NO: 1 - protein, 122 aa, Artificial Sequence
  Synthetic Polypeptide
EVQLLESGGGLVQPGGSLRLSCAASGFTFSHYIMMWVRQAPGKGLEWVSGIYSSGGITVYADSVKGRFTISRDNSKNTLYLQMNSLRAEDTAVYYCAYRRIGVPRRDEFDIWGQGTMVTVSS

SEQ ID NO: 2 - protein, 106 aa, Artificial Sequence
  Synthetic Polypeptide
DIQMTQSPSTLSASVGDRVTITCRASQSISSWLAWYQQKPGKAPKLLIYKASTLESGVPSRFSGSGSGTEFTLTISSLQPDDFATYYCQQYNTYWTFGQGTKVEIK

SEQ ID NO: 3 - protein, 123 aa, Artificial Sequence
  Synthetic Polypeptide
EVQLLESGGGLVQPGGSLRLSCAASGFTFSGYIMAWVRQAPGKGLEWVSYIYPSGGITVYADSVKGRFTISRDNSKNTLYLQMNSLRAEDTAVYYCTRQRYRGPKYYYYMDVWGKGTTVTVSS

SEQ ID NO: 4 - protein, 123 aa, Artificial Sequence
  Synthetic Polypeptide
EVQLLESGGGLVQPGGSLRLSCAASGFTFSFYSMHWVRQAPGKGLEWVSRIYPSGGVTKYADSVKGRFTISRDNSKNTLYLQMNSLRAEDTAVYYCTRQRYRGPKYYYYMDVWGKGTTVTVSS

SEQ ID NO: 5 - protein, 113 aa, Artificial Sequence
  Synthetic Polypeptide
DIQMTQSPLSLPVTPGEPASISCRSSQSLLHSNGYNYLDWYLQKPGQSPQLLIYLGSNRASGVPDRFSGSGSGTDFTLKISRVEAEDVGVYYCMQALQTPWTFGQGTKVEIKR

SEQ ID NO: 6 - protein, 112 aa, Artificial Sequence
  Synthetic Polypeptide
DIQMTQSPLSLSVAPGEPASISCRSSQSLLHRNGHNYLDWYLQKPGQSPQLLIYLGSNRASGVPERFSGSGSGTDFTLRISRVEAEDVGVYYCMQALQARTFGQGTKVEIKR

SEQ ID NO: 7 - protein, 112 aa, Artificial Sequence
  Synthetic Polypeptide
DIQMTQSPLSLPVTPGEPASISCRSSQSLLHSNGYNYLDWYLQKPGQSPQLLIYLGSNRASGVPDRFSGSGSGTDFTLKISRVEAEDVGVYYCMQALQTRTFGQGTKVEIKR

SEQ ID NO: 8 - protein, 113 aa, Artificial Sequence
  Synthetic Polypeptide
DIQMTQSPLSLPVTPGEPASISCRSSQSLLHSNGYNYLDWYLQKPGQSPQIMIYLGSNRASGVPDRFSGSGSGTDFTLKISRVEAEDVGVYYCMQALQTPRTFGQGTKVEIKR

SEQ ID NO: 9 - protein, 471 aa, Artificial Sequence
  Synthetic Polypeptide
MGWSCIILFLVATATGAHSEVQLLESGGGLVQPGGSLRLSCAASGFTFSHYIMMWVRQAPGKGLEWVSGIYSSGGITVYADSVKGRFTISRDNSKNTLYLQMNSLRAEDTAVYYCAYRRIGVPRRDEFDIWGQGTMVTVSSASTKGPSVFPLAPSSKSTSGGTAALGCLVKDYFPEPVTVSWNSGALTSGVHTFPAVLQSSGLYSLSSVVTVPSSSLGTQTYICNVNHKPSNTKVDKRVEPKSCDKTHTCPPCPAPELLGGPSVFLFPPKPKDTLMISRTPEVTCVVVDVSHEDPEVKFNWYVDGVEVHNAKTKPREEQYNSTYRVVSVLTVLHQDWLNGKEYKCKVSNKALPAPIEKTISKAKGQPREPQVYTLPPSREEMTKNQVSLTCLVKGFYPSDIAVEWESNGQPENNYKTTPPVLDSDGSFFLYSKLTVDKSRWQQGNVFSCSVMHEALHNHYTQKSLSLSPGK

SEQ ID NO: 10 - protein, 232 aa, Artificial Sequence
  Synthetic Polypeptide
MGWSCIILFLVATATGVHSDIQMTQSPSTLSASVGDRVTITCRASQSISSWLAWYQQKPGKAPKLLIYKASTLESGVPSRFSGSGSGTEFTLTISSLQPDDFATYYCQQYNTYWTFGQGTKVEIKRTVAAPSVFIFPPSDEQLKSGTASVVCLLNNFYPREAKVQWKVDNALQSGNSQESVTEQDSKDSTYSLSSTLTLSKADYEKHKVYACEVTHQGLSSPVTKSFNRGEC

SEQ ID NO: 11 - protein, 731 aa, Artificial Sequence
  Synthetic Polypeptide
MGWSCIILFLVATATGAHSEVQLLESGGGLVQPGGSLRLSCAASGFTFSHYIMMWVRQAPGKGLEWVSGIYSSGGITVYADSVKGRFTISRDNSKNTLYLQMNSLRAEDTAVYYCAYRRIGVPRRDEFDIWGQGTMVTVSSASTKGPSVFPLAPSSKSTSGGTAALGCLVKDYFPEPVTVSWNSGALTSGVHTFPAVLQSSGLYSLSSVVTVPSSSLGTQTYICNVNHKPSNTKVDKRVEPKSCDTHTCPPCPAPELLGGPSVFLFPPKPKDTLMISRTPEVTCVVVDVSHEDPEVKFNWYVDGVEVHNAKTKPREEQYNSTYRVVSVLTVLHQDWLNGKEYKCKVSNKALPAPIEKTISKAKGQPREPQVYTLPPSREEMTKNQVSLTCLVKGFYPSDIAVEWESNGQPENNYKTTPPVLDSDGSFFLYSKLTVDKSRWQQGNVFSCSVMHEALHNHYTQKSLSLSPGKSGGGSEVQLLESGGGLVQPGGSLRLSCAASGFTFSFYSMHWVRQAPGKGLEWVSRIYPSGGVTKYADSVKGRFTISRDNSKNTLYLQMNSLRAEDTAVYYCTRQRYRGPKYYYYMDVWGKGTTVTVSSGGGGSGGGGSGGGGSGGGGSDIQMTQSPLSLPVTPGEPASISCRSSQSLLHSNGYNYLDWYLQKPGQSPQLLIYLGSNRASGVPDRFSGSGSGTDFTLKISRVEAEDVGVYYCMQALQTPWTFGQGTKVEIKR

SEQ ID NO: 12 - protein, 732 aa, Artificial Sequence
  Synthetic Polypeptide
MGWSCIILFLVATATGAHSEVQLLESGGGLVQPGGSLRLSCAASGFTFSHYIMMWVRQAPGKGLEWVSGIYSSGGITVYADSVKGRFTISRDNSKNTLYLQMNSLRAEDTAVYYCAYRRIGVPRRDEFDIWGQGTMVTVSSASTKGPSVFPLAPSSKSTSGGTAALGCLVKDYFPEPVTVSWNSGALTSGVHTFPAVLQSSGLYSLSSVVTVPSSSLGTQTYICNVNHKPSNTKVDKRVEPKSCDTHTCPPCPAPELLGGPSVFLFPPKPKDTLMISRTPEVTCVVVDVSHEDPEVKFNWYVDGVEVHNAKTKPREEQYNSTYRVVSVLTVLHQDWLNGKEYKCKVSNKALPAPIEKTISKAKGQPREPQVYTLPPSREEMTKNQVSLTCLVKGFYPSDIAVEWESNGQPENNYKTTPPVLDSDGSFFLYSKLTVDKSRWQQGNVFSCSVMHEALHNHYTQKSLSLSPGKSGGGSDIQMTQSPLSLPVTPGEPASISCRSSQSLLHSNGYNYLDWYLQKPGQSPQLLIYLGSNRASGVPDRFSGSGSGTDFTLKISRVEAEDVGVYYCMQALQTPWTFGQGTKVEIKRTGGGGSGGGGSGGGGSGGGGSEVQLLESGGGLVQPGGSLRLSCAASGFTFSFYSMHWVRQAPGKGLEWVSRIYPSGGVTKYADSVKGRFTISRDNSKNTLYLQMNSLRAEDTAVYYCTRQRYRGPKYYYYMDVWGKGTTVTVSS

SEQ ID NO: 13 - protein, 730 aa, Artificial Sequence
  Synthetic Polypeptide
MGWSCIILFLVATATGAHSEVQLLESGGGLVQPGGSLRLSCAASGFTFSHYIMMWVRQAPGKGLEWVSGIYSSGGITVYADSVKGRFTISRDNSKNTLYLQMNSLRAEDTAVYYCAYRRIGVPRRDEFDIWGQGTMVTVSSASTKGPSVFPLAPSSKSTSGGTAALGCLVKDYFPEPVTVSWNSGALTSGVHTFPAVLQSSGLYSLSSVVTVPSSSLGTQTYICNVNHKPSNTKVDKRVEPKSCDTHTCPPCPAPELLGGPSVFLFPPKPKDTLMISRTPEVTCVVVDVSHEDPEVKFNWYVDGVEVHNAKTKPREEQYNSTYRVVSVLTVLHQDWLNGKEYKCKVSNKALPAPIEKTISKAKGQPREPQVYTLPPSREEMTKNQVSLTCLVKGFYPSDIAVEWESNGQPENNYKTTPPVLDSDGSFFLYSKLTVDKSRWQQGNVFSCSVMHEALHNHYTQKSLSLSPGKSGGGSEVQLLESGGGLVQPGGSLRLSCAASGFTFSGYIMAWVRQAPGKGLEWVSYIYPSGGITVYADSVKGRFTISRDNSKNTLYLQMNSLRAEDTAVYYCTRQRYRGPKYYYYMDVWGKGTTVTVSSGGGGSGGGGSGGGGSGGGGSDIQMTQSPLSLSVAPGEPASISCRSSQSLLHRNGHNYLDWYLQKPGQSPQLLIYLGSNRASGVPERFSGSGSGTDFTLRISRVEAEDVGVYYCMQALQARTFGQGTKVEIKR

SEQ ID NO: 14 - protein, 731 aa, Artificial Sequence
  Synthetic Polypeptide
MGWSCIILFLVATATGAHSEVQLLESGGGLVQPGGSLRLSCAASGFTFSHYIMMWVRQAPGKGLEWVSGIYSSGGITVYADSVKGRFTISRDNSKNTLYLQMNSLRAEDTAVYYCAYRRIGVPRRDEFDIWGQGTMVTVSSASTKGPSVFPLAPSSKSTSGGTAALGCLVKDYFPEPVTVSWNSGALTSGVHTFPAVLQSSGLYSLSSVVTVPSSSLGTQTYICNVNHKPSNTKVDKRVEPKSCDTHTCPPCPAPELLGGPSVFLFPPKPKDTLMISRTPEVTCVVVDVSHEDPEVKFNWYVDGVEVHNAKTKPREEQYNSTYRVVSVLTVLHQDWLNGKEYKCKVSNKALPAPIEKTISKAKGQPREPQVYTLPPSREEMTKNQVSLTCLVKGFYPSDIAVEWESNGQPENNYKTTPPVLDSDGSFFLYSKLTVDKSRWQQGNVFSCSVMHEALHNHYTQKSLSLSPGKSGGGSDIQMTQSPLSLSVAPGEPASISCRSSQSLLHRNGHNYLDWYLQKPGQSPQLLIYLGSNRASGVPERFSGSGSGTDFTLRISRVEAEDVGVYYCMQALQARTFGQGTKVEIKRTGGGGSGGGGSGGGGSGGGGSEVQLLESGGGLVQPGGSLRLSCAASGFTFSGYIMAWVRQAPGKGLEWVSYIYPSGGITVYADSVKGRFTISRDNSKNTLYLQMNSLRAEDTAVYYCTRQRYRGPKYYYYMDVWGKGTTVTVSS

SEQ ID NO: 15 - protein, 730 aa, Artificial Sequence
  Synthetic Polypeptide
MGWSCIILFLVATATGAHSEVQLLESGGGLVQPGGSLRLSCAASGFTFSHYIMMWVRQAPGKGLEWVSGIYSSGGITVYADSVKGRFTISRDNSKNTLYLQMNSLRAEDTAVYYCAYRRIGVPRRDEFDIWGQGTMVTVSSASTKGPSVFPLAPSSKSTSGGTAALGCLVKDYFPEPVTVSWNSGALTSGVHTFPAVLQSSGLYSLSSVVTVPSSSLGTQTYICNVNHKPSNTKVDKRVEPKSCDTHTCPPCPAPELLGGPSVFLFPPKPKDTLMISRTPEVTCVVVDVSHEDPEVKFNWYVDGVEVHNAKTKPREEQYNSTYRVVSVLTVLHQDWLNGKEYKCKVSNKALPAPIEKTISKAKGQPREPQVYTLPPSREEMTKNQVSLTCLVKGFYPSDIAVEWESNGQPENNYKTTPPVLDSDGSFFLYSKLTVDKSRWQQGNVFSCSVMHEALHNHYTQKSLSLSPGKSGGGSEVQLLESGGGLVQPGGSLRLSCAASGFTFSGYIMAWVRQAPGKGLEWVSYIYPSGGITVYADSVKGRFTISRDNSKNTLYLQMNSLRAEDTAVYYCTRQRYRGPKYYYYMDVWGKGTTVTVSSGGGGSGGGGSGGGGSGGGGSDIQMTQSPLSLPVTPGEPASISCRSSQSLLHSNGYNYLDWYLQKPGQSPQLLIYLGSNRASGVPDRFSGSGSGTDFTLKISRVEAEDVGVYYCMQALQTRTFGQGTKVEIKR

SEQ ID NO: 16 - protein, 731 aa, Artificial Sequence
  Synthetic Polypeptide
MGWSCIILFLVATATGAHSEVQLLESGGGLVQPGGSLRLSCAASGFTFSHYIMMWVRQAPGKGLEWVSGIYSSGGITVYADSVKGRFTISRDNSKNTLYLQMNSLRAEDTAVYYCAYRRIGVPRRDEFDIWGQGTMVTVSSASTKGPSVFPLAPSSKSTSGGTAALGCLVKDYFPEPVTVSWNSGALTSGVHTFPAVLQSSGLYSLSSVVTVPSSSLGTQTYICNVNHKPSNTKVDKRVEPKSCDTHTCPPCPAPELLGGPSVFLFPPKPKDTLMISRTPEVTCVVVDVSHEDPEVKFNWYVDGVEVHNAKTKPREEQYNSTYRVVSVLTVLHQDWLNGKEYKCKVSNKALPAPIEKTISKAKGQPREPQVYTLPPSREEMTKNQVSLTCLVKGFYPSDIAVEWESNGQPENNYKTTPPVLDSDGSFFLYSKLTVDKSRWQQGNVFSCSVMHEALHNHYTQKSLSLSPGKSGGGSDIQMTQSPLSLPVTPGEPASISCRSSQSLLHSNGYNYLDWYLQKPGQSPQLLIYLGSNRASGVPDRFSGSGSGTDFTLKISRVEAEDVGVYYCMQALQTRTFGQGTKVEIKRTGGGGSGGGGSGGGGSGGGGSEVQLLESGGGLVQPGGSLRLSCAASGFTFSGYIMAWVRQAPGKGLEWVSYIYPSGGITVYADSVKGRFTISRDNSKNTLYLQMNSLRAEDTAVYYCTRQRYRGPKYYYYMDVWGKGTTVTVSS

SEQ ID NO: 17 - protein, 731 aa, Artificial Sequence
  Synthetic Polypeptide
MGWSCIILFLVATATGAHSEVQLLESGGGLVQPGGSLRLSCAASGFTFSHYIMMWVRQAPGKGLEWVSGIYSSGGITVYADSVKGRFTISRDNSKNTLYLQMNSLRAEDTAVYYCAYRRIGVPRRDEFDIWGQGTMVTVSSASTKGPSVFPLAPSSKSTSGGTAALGCLVKDYFPEPVTVSWNSGALTSGVHTFPAVLQSSGLYSLSSVVTVPSSSLGTQTYICNVNHKPSNTKVDKRVEPKSCDTHTCPPCPAPELLGGPSVFLFPPKPKDTLMISRTPEVTCVVVDVSHEDPEVKFNWYVDGVEVHNAKTKPREEQYNSTYRVVSVLTVLHQDWLNGKEYKCKVSNKALPAPIEKTISKAKGQPREPQVYTLPPSREEMTKNQVSLTCLVKGFYPSDIAVEWESNGQPENNYKTTPPVLDSDGSFFLYSKLTVDKSRWQQGNVFSCSVMHEALHNHYTQKSLSLSPGKSGGGSEVQLLESGGGLVQPGGSLRLSCAASGFTFSGYIMAWVRQAPGKGLEWVSYIYPSGGITVYADSVKGRFTISRDNSKNTLYLQMNSLRAEDTAVYYCTRQRYRGPKYYYYMDVWGKGTTVTVSSGGGGSGGGGSGGGGSGGGGSDIQMTQSPLSLPVTPGEPASISCRSSQSLLHSNGYNYLDWYLQKPGQSPQIMIYLGSNRASGVPDRFSGSGSGTDFTLKISRVEAEDVGVYYCMQALQTPRTFGQGTKVEIKR

SEQ ID NO: 18 - protein, 732 aa, Artificial Sequence
  Synthetic Polypeptide
MGWSCIILFLVATATGAHSEVQLLESGGGLVQPGGSLRLSCAASGFTFSHYIMMWVRQAPGKGLEWVSGIYSSGGITVYADSVKGRFTISRDNSKNTLYLQMNSLRAEDTAVYYCAYRRIGVPRRDEFDIWGQGTMVTVSSASTKGPSVFPLAPSSKSTSGGTAALGCLVKDYFPEPVTVSWNSGALTSGVHTFPAVLQSSGLYSLSSVVTVPSSSLGTQTYICNVNHKPSNTKVDKRVEPKSCDTHTCPPCPAPELLGGPSVFLFPPKPKDTLMISRTPEVTCVVVDVSHEDPEVKFNWYVDGVEVHNAKTKPREEQYNSTYRVVSVLTVLHQDWLNGKEYKCKVSNKALPAPIEKTISKAKGQPREPQVYTLPPSREEMTKNQVSLTCLVKGFYPSDIAVEWESNGQPENNYKTTPPVLDSDGSFFLYSKLTVDKSRWQQGNVFSCSVMHEALHNHYTQKSLSLSPGKSGGGSDIQMTQSPLSLPVTPGEPASISCRSSQSLLHSNGYNYLDWYLQKPGQSPQIMIYLGSNRASGVPDRFSGSGSGTDFTLKISRVEAEDVGVYYCMQALQTPRTFGQGTKVEIKRTGGGGSGGGGSGGGGSGGGGSEVQLLESGGGLVQPGGSLRLSCAASGFTFSGYIMAWVRQAPGKGLEWVSYIYPSGGITVYADSVKGRFTISRDNSKNTLYLQMNSLRAEDTAVYYCTRQRYRGPKYYYYMDVWGKGTTVTVSS

SEQ ID NO: 19 - protein, 731 aa, Artificial Sequence
  Synthetic Polypeptide
MGWSCIILFLVATATGAHSEVQLLESGGGLVQPGGSLRLSCAASGFTFSHYIMMWVRQAPGKGLEWVSGIYSSGGITVYADSVKGRFTISRDNSKNTLYLQMNSLRAEDTAVYYCAYRRIGVPRRDEFDIWGQGTMVTVSSASTKGPSVFPLAPSSKSTSGGTAALGCLVKDYFPEPVTVSWNSGALTSGVHTFPAVLQSSGLYSLSSVVTVPSSSLGTQTYICNVNHKPSNTKVDKRVEPKSCDTHTCPPCPAPELLGGPSVFLFPPKPKDTLMISRTPEVTCVVVDVSHEDPEVKFNWYVDGVEVHNAKTKPREEQYNSTYRVVSVLTVLHQDWLNGKEYKCKVSNKALPAPIEKTISKAKGQPREPQVYTLPPSREEMTKNQVSLTCLVKGFYPSDIAVEWESNGQPENNYKTTPPVLDSDGSFFLYSKLTVDKSRWQQGNVFSCSVMHEALHNHYTQKSLSLSPGKSGGGSEVQLLESGGGLVQPGGSLRLSCAASGFTFSGYIMAWVRQAPGKGLEWVSYIYPSGGITVYADSVKGRFTISRDNSKNTLYLQMNSLRAEDTAVYYCTRQRYRGPKYYYYMDVWGKGTTVTVSSGGGGSGGGGSGGGGSGGGGSDIQMTQSPLSLPVTPGEPASISCRSSQSLLHSNGYNYLDWYLQKPGQSPQLLIYLGSNRASGVPDRFSGSGSGTDFTLKISRVEAEDVGVYYCMQALQTPWTFGQGTKVEIKR

SEQ ID NO: 20 - protein, 732 aa, Artificial Sequence
  Synthetic Polypeptide
MGWSCIILFLVATATGAHSEVQLLESGGGLVQPGGSLRLSCAASGFTFSHYIMMWVRQAPGKGLEWVSGIYSSGGITVYADSVKGRFTISRDNSKNTLYLQMNSLRAEDTAVYYCAYRRIGVPRRDEFDIWGQGTMVTVSSASTKGPSVFPLAPSSKSTSGGTAALGCLVKDYFPEPVTVSWNSGALTSGVHTFPAVLQSSGLYSLSSVVTVPSSSLGTQTYICNVNHKPSNTKVDKRVEPKSCDTHTCPPCPAPELLGGPSVFLFPPKPKDTLMISRTPEVTCVVVDVSHEDPEVKFNWYVDGVEVHNAKTKPREEQYNSTYRVVSVLTVLHQDWLNGKEYKCKVSNKALPAPIEKTISKAKGQPREPQVYTLPPSREEMTKNQVSLTCLVKGFYPSDIAVEWESNGQPENNYKTTPPVLDSDGSFFLYSKLTVDKSRWQQGNVFSCSVMHEALHNHYTQKSLSLSPGKSGGGSDIQMTQSPLSLPVTPGEPASISCRSSQSLLHSNGYNYLDWYLQKPGQSPQLLIYLGSNRASGVPDRFSGSGSGTDFTLKISRVEAEDVGVYYCMQALQTPWTFGQGTKVEIKRTGGGGSGGGGSGGGGSGGGGSEVQLLESGGGLVQPGGSLRLSCAASGFTFSGYIMAWVRQAPGKGLEWVSYIYPSGGITVYADSVKGRFTISRDNSKNTLYLQMNSLRAEDTAVYYCTRQRYRGPKYYYYMDVWGKGTTVTVSS

SEQ ID NO: 21 - protein, 248 aa, Artificial Sequence
  Synthetic Polypeptide
IVGGTNSSWGEWPWQVSLQVKLTAQRHLCGGSLIGHQWVLTAAHCFDGLPLQDVWRIYSGILNLSDITKDTPFSQIKEIIIHQNYKVSEGNHDIALIKLQAPLNYTEFQKPISLPSKGDTSTIYTNCWVTGWGFSKEKGEIQNILQKVNIPLVTNEECQKRYQDYKITQRMVCAGYKEGGKDACKGDSGGPLVCKHNGMWRLVGITSWGEGCARREQPGVYTKVAEYMDWILEKTQSSDGKAQMQSPA

SEQ ID NO: 22 - protein, 5 aa, Artificial Sequence
  Synthetic Polypeptide
SGGGS

SEQ ID NO: 23 - protein, 20 aa, Artificial Sequence
  Synthetic Polypeptide
GGGGSGGGGSGGGGSGGGGS

SEQ ID NO: 24 - DNA, 3535 bp, Artificial Sequence
  Synthetic Polynucleotide
atgggatggtcctgcatcatcctgtttctggtggctacagccacaggcgtgcactccgacatccagatgacccagtccccctccaccctgtccgcctctgtgggcgacagagtgaccatcacctgtcgggcctcccagtccatctccagctggctggcctggtatcagcagaagcccggcaaggcccccaagctgctgatctacaaggccagcaccctggaatccggcgtgccctccagattctccggctctggctccggcaccgagttcaccctgaccatcagctccctgcagcccgacgacttcgccacctactactgccagcagtacaacacctactggaccttcggccagggcaccaaggtggaaatcaagcggaccgtggccgctccctccgtgttcatcttcccaccctccgacgagcagctgaagtccggcaccgcctccgtggtctgcctgctgaacaacttctacccccgcgaggccaaggtgcagtggaaggtggacaacgccctgcagtccggcaactcccaggaatccgtgaccgagcaggactccaaggacagcacctactccctgtcctctaccctgaccctgtccaaggccgactacgagaagcacaaggtgtacgcctgcgaagtgacccaccagggcctgtccagccccgtgaccaagtccttcaaccggggcgagtgctgatgaggcgcgccttcgcgtcgagcatgcatctagggcggccaattccgcccctctccccccccccccctaacgttactggccgaagccgcttggaataaggccggtgtgcgtttgtctatatgttattttccaccatattgccgtcttttggcaatgtgagggcccggaaacctggccctgtcttcttgacgagcattcctaggggtctttcccctctcgccaaaggaatgcaaggtctgttgaatgtcgtgaaggaagcagttcctctggaagcttcttgaagacaaacaacgtctgtagcgaccctttgcaggcagcggaaccccccacctggcgacaggtgcctctgcggccaaaagccacgtgtataagatacacctgcaaaggcggcacaaccccagtgccacgttgtgagttggatagttgtggaaagagtcaaatggctctcttcaagcgtattcaacaaggggctgaaggatgcccagaaggtaccccattgtatgggatctgatctggggcctcggtgcagatgctttacatgtgtttagtcgaggttaaaaaaacgtctaggccccccgaaccacggggacgtggttttcctttgaaaaacacgatgataatatggccacaaccatgggatggtcctgcatcatcctgtttctggtggccacagccacaggcgctcactccgaggtgcaattgctggaatccggcggaggactggtgcagcctggcggctccctgagactgtcttgcgccgcctccggcttcaccttctcccactacatcatgatgtgggtgcgacaggctcctggcaaggggctggaatgggtgtccggcatctactcctccggcggcatcaccgtgtacgccgactccgtgaagggccggttcaccatctctcgggacaactccaagaacaccctgtacctgcagatgaactccctgcgggccgaggacaccgccgtgtactactgcgcctaccggcggatcggcgtgcccagacgggacgagttcgacatctgggggcagggcaccatggtgacagtgtcctccgcctccaccaagggcccctctgtgttcccgctagcaccctccagcaagtccacctccggcggcaccgctgctctgggctgcctcgtcaaggactacttccccgagcccgtgaccgtgtcctggaactctggcgccctgaccagcggagtgcataccttccctgccgtgctccagtcctccggcctgtacagcctgtcctctgtcgtgaccgtgccctccagctccctgggcacccagacctacatctgcaacgtgaaccacaagccctccaacaccaaagtggacaagcgggtggaacccaagtcctgcgacacccacacctgtcccccttgccctgcccctgaactgctgggcggacccagcgtgttcctgttccccccaaagcccaaggacaccctgatgatctcccggacccccgaagtgacctgcgtggtggtggacgtgtcccacgaggaccctgaagtgaagtttaattggtacgtggacggcgtggaagtgcataacgccaagaccaagcccagagaggaacagtacaactccacctaccgggtggtgtccgtgctgaccgtgctgcaccaggactggctgaacggcaaagagtacaagtgcaaggtgtccaacaaggccctgcctgcccccatcgaaaagaccatcagcaaggccaagggccagcctcgcgagccccaggtgtacaccctgccccctagccgggaagagatgaccaagaaccaggtgtccctgacctgtctggtcaagggcttctacccctccgatatcgccgtggaatgggagtccaacggccagcccgagaacaactacaagaccaccccccctgtgctggacagcgacggctcattcttcctgtactccaagctgaccgtggacaagtcccggtggcagcagggcaacgtgttctcctgctccgtgatgcacgaggccctgcacaaccactacacccagaagtccctgtccctgtctcccggcaagtctggcggaggatccgaagtgcagctgctggaaagcggcggaggcctggtgcagcctggaggcagcctgagactgtcttgcgctgccagcggcttcaccttcagcttctacagcatgcactgggtccgacaggctccaggcaagggcctggaatgggtgtcccggatctacccctctggcggcgtgaccaaatacgccgacagcgtgaagggccggttcaccatcagccgggacaacagcaagaacaccctgtacctgcagatgaacagcctgcgggccgaggacaccgccgtgtactactgcacccggcagcggtacagaggccccaagtactactactacatggacgtgtggggcaagggcacaaccgtgaccgtgtctagcggaggcggaggatctggcggaggtggaagtggtggtggcggaagtggcggaggcggcagcgacatccagatgacccagagccccctgagcctgcccgtgacacctggcgagcctgccagcatcagctgcagaagcagccagagcctgctgcacagcaacggctacaactacctggactggtatctgcagaagcccggccagtccccccagctgctgatctacctgggcagcaacagagccagcggcgtgcccgacagattcagcggcagcggctccggcaccgacttcaccctgaagatcagccgggtggaagccgaggacgtgggcgtgtactattgcatgcaggccctgcagaccccctggaccttcggccagggcaccaaggtggaaatcaagagatgaatctaga

SEQ ID NO: 25 - DNA, 3538 bp, Artificial Sequence
  Synthetic Polynucleotide
atgggatggtcctgcatcatcctgtttctggtggctacagccacaggcgtgcactccgacatccagatgacccagtccccctccaccctgtccgcctctgtgggcgacagagtgaccatcacctgtcgggcctcccagtccatctccagctggctggcctggtatcagcagaagcccggcaaggcccccaagctgctgatctacaaggccagcaccctggaatccggcgtgccctccagattctccggctctggctccggcaccgagttcaccctgaccatcagctccctgcagcccgacgacttcgccacctactactgccagcagtacaacacctactggaccttcggccagggcaccaaggtggaaatcaagcggaccgtggccgctccctccgtgttcatcttcccaccctccgacgagcagctgaagtccggcaccgcctccgtggtctgcctgctgaacaacttctacccccgcgaggccaaggtgcagtggaaggtggacaacgccctgcagtccggcaactcccaggaatccgtgaccgagcaggactccaaggacagcacctactccctgtcctctaccctgaccctgtccaaggccgactacgagaagcacaaggtgtacgcctgcgaagtgacccaccagggcctgtccagccccgtgaccaagtccttcaaccggggcgagtgctgatgaggcgcgccttcgcgtcgagcatgcatctagggcggccaattccgcccctctccccccccccccctaacgttactggccgaagccgcttggaataaggccggtgtgcgtttgtctatatgttattttccaccatattgccgtcttttggcaatgtgagggcccggaaacctggccctgtcttcttgacgagcattcctaggggtctttcccctctcgccaaaggaatgcaaggtctgttgaatgtcgtgaaggaagcagttcctctggaagcttcttgaagacaaacaacgtctgtagcgaccctttgcaggcagcggaaccccccacctggcgacaggtgcctctgcggccaaaagccacgtgtataagatacacctgcaaaggcggcacaaccccagtgccacgttgtgagttggatagttgtggaaagagtcaaatggctctcttcaagcgtattcaacaaggggctgaaggatgcccagaaggtaccccattgtatgggatctgatctggggcctcggtgcagatgctttacatgtgtttagtcgaggttaaaaaaacgtctaggccccccgaaccacggggacgtggttttcctttgaaaaacacgatgataatatggccacaaccatgggatggtcctgcatcatcctgtttctggtggccacagccacaggcgctcactccgaggtgcaattgctggaatccggcggaggactggtgcagcctggcggctccctgagactgtcttgcgccgcctccggcttcaccttctcccactacatcatgatgtgggtgcgacaggctcctggcaaggggctggaatgggtgtccggcatctactcctccggcggcatcaccgtgtacgccgactccgtgaagggccggttcaccatctctcgggacaactccaagaacaccctgtacctgcagatgaactccctgcgggccgaggacaccgccgtgtactactgcgcctaccggcggatcggcgtgcccagacgggacgagttcgacatctgggggcagggcaccatggtgacagtgtcctccgcctccaccaagggcccctctgtgttcccgctagcaccctccagcaagtccacctccggcggcaccgctgctctgggctgcctcgtcaaggactacttccccgagcccgtgaccgtgtcctggaactctggcgccctgaccagcggagtgcataccttccctgccgtgctccagtcctccggcctgtacagcctgtcctctgtcgtgaccgtgccctccagctccctgggcacccagacctacatctgcaacgtgaaccacaagccctccaacaccaaagtggacaagcgggtggaacccaagtcctgcgacacccacacctgtcccccttgccctgcccctgaactgctgggcggacccagcgtgttcctgttccccccaaagcccaaggacaccctgatgatctcccggacccccgaagtgacctgcgtggtggtggacgtgtcccacgaggaccctgaagtgaagtttaattggtacgtggacggcgtggaagtgcataacgccaagaccaagcccagagaggaacagtacaactccacctaccgggtggtgtccgtgctgaccgtgctgcaccaggactggctgaacggcaaagagtacaagtgcaaggtgtccaacaaggccctgcctgcccccatcgaaaagaccatcagcaaggccaagggccagcctcgcgagccccaggtgtacaccctgccccctagccgggaagagatgaccaagaaccaggtgtccctgacctgtctggtcaagggcttctacccctccgatatcgccgtggaatgggagtccaacggccagcccgagaacaactacaagaccaccccccctgtgctggacagcgacggctcattcttcctgtactccaagctgaccgtggacaagtcccggtggcagcagggcaacgtgttctcctgctccgtgatgcacgaggccctgcacaaccactacacccagaagtccctgtccctgtctcccggcaagtctggcggaggatccgacatccagatgacccagagccccctgagcctgcccgtgacacctggcgagcctgccagcatcagctgcagaagcagccagagcctgctgcacagcaacggctacaactacctggactggtatctgcagaagcccggccagtccccccagctgctgatctacctgggcagcaacagagccagcggcgtgcccgacagattcagcggcagcggctccggcaccgacttcaccctgaagatcagccgggtcgaagccgaggacgtgggcgtgtactactgcatgcaggccctgcagaccccctggaccttcggccagggcaccaaggtggaaatcaagcggacaggcggcggaggctctggcggaggtggaagcggaggcggaggaagtggcggaggcggctctgaggtgcagctgctggaatctggaggcggactggtgcagcctggcggcagcctgagactgtcttgcgctgccagcggcttcaccttcagcttctacagcatgcactgggtccgacaggcccctggcaagggcctggaatgggtgtcccggatctacccctctggcggcgtgaccaaatacgccgacagcgtgaagggccggttcaccatcagccgggacaacagcaagaacaccctgtacctgcagatgaacagcctgcgggccgaggacaccgccgtgtactattgcacccggcagcggtacagaggccccaagtactactactacatggacgtgtggggcaagggcaccaccgtgaccgtgtccagctgaatctaga

SEQ ID NO: 26 - DNA, 3532 bp, Artificial Sequence
  Synthetic Polynucleotide
atgggatggtcctgcatcatcctgtttctggtggctacagccacaggcgtgcactccgacatccagatgacccagtccccctccaccctgtccgcctctgtgggcgacagagtgaccatcacctgtcgggcctcccagtccatctccagctggctggcctggtatcagcagaagcccggcaaggcccccaagctgctgatctacaaggccagcaccctggaatccggcgtgccctccagattctccggctctggctccggcaccgagttcaccctgaccatcagctccctgcagcccgacgacttcgccacctactactgccagcagtacaacacctactggaccttcggccagggcaccaaggtggaaatcaagcggaccgtggccgctccctccgtgttcatcttcccaccctccgacgagcagctgaagtccggcaccgcctccgtggtctgcctgctgaacaacttctacccccgcgaggccaaggtgcagtggaaggtggacaacgccctgcagtccggcaactcccaggaatccgtgaccgagcaggactccaaggacagcacctactccctgtcctctaccctgaccctgtccaaggccgactacgagaagcacaaggtgtacgcctgcgaagtgacccaccagggcctgtccagccccgtgaccaagtccttcaaccggggcgagtgctgatgaggcgcgccttcgcgtcgagcatgcatctagggcggccaattccgcccctctccccccccccccctaacgttactggccgaagccgcttggaataaggccggtgtgcgtttgtctatatgttattttccaccatattgccgtcttttggcaatgtgagggcccggaaacctggccctgtcttcttgacgagcattcctaggggtctttcccctctcgccaaaggaatgcaaggtctgttgaatgtcgtgaaggaagcagttcctctggaagcttcttgaagacaaacaacgtctgtagcgaccctttgcaggcagcggaaccccccacctggcgacaggtgcctctgcggccaaaagccacgtgtataagatacacctgcaaaggcggcacaaccccagtgccacgttgtgagttggatagttgtggaaagagtcaaatggctctcttcaagcgtattcaacaaggggctgaaggatgcccagaaggtaccccattgtatgggatctgatctggggcctcggtgcagatgctttacatgtgtttagtcgaggttaaaaaaacgtctaggccccccgaaccacggggacgtggttttcctttgaaaaacacgatgataatatggccacaaccatgggatggtcctgcatcatcctgtttctggtggccacagccacaggcgctcactccgaggtgcaattgctggaatccggcggaggactggtgcagcctggcggctccctgagactgtcttgcgccgcctccggcttcaccttctcccactacatcatgatgtgggtgcgacaggctcctggcaaggggctggaatgggtgtccggcatctactcctccggcggcatcaccgtgtacgccgactccgtgaagggccggttcaccatctctcgggacaactccaagaacaccctgtacctgcagatgaactccctgcgggccgaggacaccgccgtgtactactgcgcctaccggcggatcggcgtgcccagacgggacgagttcgacatctgggggcagggcaccatggtgacagtgtcctccgcctccaccaagggcccctctgtgttcccgctagcaccctccagcaagtccacctccggcggcaccgctgctctgggctgcctcgtcaaggactacttccccgagcccgtgaccgtgtcctggaactctggcgccctgaccagcggagtgcataccttccctgccgtgctccagtcctccggcctgtacagcctgtcctctgtcgtgaccgtgccctccagctccctgggcacccagacctacatctgcaacgtgaaccacaagccctccaacaccaaagtggacaagcgggtggaacccaagtcctgcgacacccacacctgtcccccttgccctgcccctgaactgctgggcggacccagcgtgttcctgttccccccaaagcccaaggacaccctgatgatctcccggacccccgaagtgacctgcgtggtggtggacgtgtcccacgaggaccctgaagtgaagtttaattggtacgtggacggcgtggaagtgcataacgccaagaccaagcccagagaggaacagtacaactccacctaccgggtggtgtccgtgctgaccgtgctgcaccaggactggctgaacggcaaagagtacaagtgcaaggtgtccaacaaggccctgcctgcccccatcgaaaagaccatcagcaaggccaagggccagcctcgcgagccccaggtgtacaccctgccccctagccgggaagagatgaccaagaaccaggtgtccctgacctgtctggtcaagggcttctacccctccgatatcgccgtggaatgggagtccaacggccagcccgagaacaactacaagaccaccccccctgtgctggacagcgacggctcattcttcctgtactccaagctgaccgtggacaagtcccggtggcagcagggcaacgtgttctcctgctccgtgatgcacgaggccctgcacaaccactacacccagaagtccctgtccctgtctcccggcaagtctggcggaggatccgaagtgcagctgctggaaagcggcggaggactggtgcagcctggcggctccctgagactgtcttgcgccgccagcggcttcaccttcagcggctacatcatggcctgggtccgacaggctccaggcaagggcctggaatgggtgtcctacatctaccccagcggcggcatcaccgtgtacgccgacagcgtgaagggccggttcaccatcagccgggacaacagcaagaacaccctgtacctgcagatgaacagcctgcgggccgaggacaccgccgtgtactactgcacccggcagcggtacagaggccccaagtactactactacatggacgtgtggggcaagggcaccaccgtgaccgtgtctagcggaggcggaggatctggcggaggtggaagtggtggtggcggaagtggcggcggaggcagcgacatccagatgacccagagccccctgagcctgagcgtggcacctggcgagcctgccagcatcagctgcagaagcagccagagcctgctgcaccggaacggccacaactacctggactggtatctgcagaagcccggccagtccccccagctgctgatctacctgggcagcaacagagccagcggcgtgcccgagagattcagcggcagcggctccggcaccgacttcaccctgcggatcagccgggtggaagccgaggacgtgggcgtgtactattgcatgcaggctctgcaggccagaaccttcggccagggcaccaaggtggaaatcaagagatgaatctaga

SEQ ID NO: 27 - DNA, 3535 bp, Artificial Sequence
  Synthetic Polynucleotide
atgggatggtcctgcatcatcctgtttctggtggctacagccacaggcgtgcactccgacatccagatgacccagtccccctccaccctgtccgcctctgtgggcgacagagtgaccatcacctgtcgggcctcccagtccatctccagctggctggcctggtatcagcagaagcccggcaaggcccccaagctgctgatctacaaggccagcaccctggaatccggcgtgccctccagattctccggctctggctccggcaccgagttcaccctgaccatcagctccctgcagcccgacgacttcgccacctactactgccagcagtacaacacctactggaccttcggccagggcaccaaggtggaaatcaagcggaccgtggccgctccctccgtgttcatcttcccaccctccgacgagcagctgaagtccggcaccgcctccgtggtctgcctgctgaacaacttctacccccgcgaggccaaggtgcagtggaaggtggacaacgccctgcagtccggcaactcccaggaatccgtgaccgagcaggactccaaggacagcacctactccctgtcctctaccctgaccctgtccaaggccgactacgagaagcacaaggtgtacgcctgcgaagtgacccaccagggcctgtccagccccgtgaccaagtccttcaaccggggcgagtgctgatgaggcgcgccttcgcgtcgagcatgcatctagggcggccaattccgcccctctccccccccccccctaacgttactggccgaagccgcttggaataaggccggtgtgcgtttgtctatatgttattttccaccatattgccgtcttttggcaatgtgagggcccggaaacctggccctgtcttcttgacgagcattcctaggggtctttcccctctcgccaaaggaatgcaaggtctgttgaatgtcgtgaaggaagcagttcctctggaagcttcttgaagacaaacaacgtctgtagcgaccctttgcaggcagcggaaccccccacctggcgacaggtgcctctgcggccaaaagccacgtgtataagatacacctgcaaaggcggcacaaccccagtgccacgttgtgagttggatagttgtggaaagagtcaaatggctctcttcaagcgtattcaacaaggggctgaaggatgcccagaaggtaccccattgtatgggatctgatctggggcctcggtgcagatgctttacatgtgtttagtcgaggttaaaaaaacgtctaggccccccgaaccacggggacgtggttttcctttgaaaaacacgatgataatatggccacaaccatgggatggtcctgcatcatcctgtttctggtggccacagccacaggcgctcactccgaggtgcaattgctggaatccggcggaggactggtgcagcctggcggctccctgagactgtcttgcgccgcctccggcttcaccttctcccactacatcatgatgtgggtgcgacaggctcctggcaaggggctggaatgggtgtccggcatctactcctccggcggcatcaccgtgtacgccgactccgtgaagggccggttcaccatctctcgggacaactccaagaacaccctgtacctgcagatgaactccctgcgggccgaggacaccgccgtgtactactgcgcctaccggcggatcggcgtgcccagacgggacgagttcgacatctgggggcagggcaccatggtgacagtgtcctccgcctccaccaagggcccctctgtgttcccgctagcaccctccagcaagtccacctccggcggcaccgctgctctgggctgcctcgtcaaggactacttccccgagcccgtgaccgtgtcctggaactctggcgccctgaccagcggagtgcataccttccctgccgtgctccagtcctccggcctgtacagcctgtcctctgtcgtgaccgtgccctccagctccctgggcacccagacctacatctgcaacgtgaaccacaagccctccaacaccaaagtggacaagcgggtggaacccaagtcctgcgacacccacacctgtcccccttgccctgcccctgaactgctgggcggacccagcgtgttcctgttccccccaaagcccaaggacaccctgatgatctcccggacccccgaagtgacctgcgtggtggtggacgtgtcccacgaggaccctgaagtgaagtttaattggtacgtggacggcgtggaagtgcataacgccaagaccaagcccagagaggaacagtacaactccacctaccgggtggtgtccgtgctgaccgtgctgcaccaggactggctgaacggcaaagagtacaagtgcaaggtgtccaacaaggccctgcctgcccccatcgaaaagaccatcagcaaggccaagggccagcctcgcgagccccaggtgtacaccctgccccctagccgggaagagatgaccaagaaccaggtgtccctgacctgtctggtcaagggcttctacccctccgatatcgccgtggaatgggagtccaacggccagcccgagaacaactacaagaccaccccccctgtgctggacagcgacggctcattcttcctgtactccaagctgaccgtggacaagtcccggtggcagcagggcaacgtgttctcctgctccgtgatgcacgaggccctgcacaaccactacacccagaagtccctgtccctgtctcccggcaagtctggcggaggatccgacatccagatgacccagagccccctgagcctgagcgtggcacctggcgagcctgccagcatcagctgcagaagcagccagagcctgctgcaccggaacggccacaactacctggactggtatctgcagaagcccggccagtccccccagctgctgatctacctgggcagcaacagagccagcggcgtgcccgagagattcagcggcagcggctccggcaccgacttcaccctgcggatcagccgggtcgaagccgaggacgtgggcgtgtactactgcatgcaggctctgcaggccagaaccttcggccagggcaccaaggtggaaatcaagcggacaggcggcggaggctctggcggaggtggaagcggaggcggaggaagtggcggaggcggctctgaggtgcagctgctggaatctggcggcggactggtgcagcctggcggcagcctgagactgtcttgcgccgccagcggcttcaccttcagcggctacatcatggcctgggtccgacaggcccctggcaagggcctggaatgggtgtcctacatctaccccagcggcggcatcaccgtgtacgccgacagcgtgaagggccggttcaccatcagccgggacaacagcaagaacaccctgtacctgcagatgaacagcctgcgggccgaggacaccgccgtgtactattgcacccggcagcggtacagaggccccaagtactactactacatggacgtgtggggcaagggcaccaccgtgaccgtgtccagctgaatctaga

SEQ ID NO: 28 - DNA, 3532 bp, Artificial Sequence
  Synthetic Polynucleotide
atgggatggtcctgcatcatcctgtttctggtggctacagccacaggcgtgcactccgacatccagatgacccagtccccctccaccctgtccgcctctgtgggcgacagagtgaccatcacctgtcgggcctcccagtccatctccagctggctggcctggtatcagcagaagcccggcaaggcccccaagctgctgatctacaaggccagcaccctggaatccggcgtgccctccagattctccggctctggctccggcaccgagttcaccctgaccatcagctccctgcagcccgacgacttcgccacctactactgccagcagtacaacacctactggaccttcggccagggcaccaaggtggaaatcaagcggaccgtggccgctccctccgtgttcatcttcccaccctccgacgagcagctgaagtccggcaccgcctccgtggtctgcctgctgaacaacttctacccccgcgaggccaaggtgcagtggaaggtggacaacgccctgcagtccggcaactcccaggaatccgtgaccgagcaggactccaaggacagcacctactccctgtcctctaccctgaccctgtccaaggccgactacgagaagcacaaggtgtacgcctgcgaagtgacccaccagggcctgtccagccccgtgaccaagtccttcaaccggggcgagtgctgatgaggcgcgccttcgcgtcgagcatgcatctagggcggccaattccgcccctctccccccccccccctaacgttactggccgaagccgcttggaataaggccggtgtgcgtttgtctatatgttattttccaccatattgccgtcttttggcaatgtgagggcccggaaacctggccctgtcttcttgacgagcattcctaggggtctttcccctctcgccaaaggaatgcaaggtctgttgaatgtcgtgaaggaagcagttcctctggaagcttcttgaagacaaacaacgtctgtagcgaccctttgcaggcagcggaaccccccacctggcgacaggtgcctctgcggccaaaagccacgtgtataagatacacctgcaaaggcggcacaaccccagtgccacgttgtgagttggatagttgtggaaagagtcaaatggctctcttcaagcgtattcaacaaggggctgaaggatgcccagaaggtaccccattgtatgggatctgatctggggcctcggtgcagatgctttacatgtgtttagtcgaggttaaaaaaacgtctaggccccccgaaccacggggacgtggttttcctttgaaaaacacgatgataatatggccacaaccatgggatggtcctgcatcatcctgtttctggtggccacagccacaggcgctcactccgaggtgcaattgctggaatccggcggaggactggtgcagcctggcggctccctgagactgtcttgcgccgcctccggcttcaccttctcccactacatcatgatgtgggtgcgacaggctcctggcaaggggctggaatgggtgtccggcatctactcctccggcggcatcaccgtgtacgccgactccgtgaagggccggttcaccatctctcgggacaactccaagaacaccctgtacctgcagatgaactccctgcgggccgaggacaccgccgtgtactactgcgcctaccggcggatcggcgtgcccagacgggacgagttcgacatctgggggcagggcaccatggtgacagtgtcctccgcctccaccaagggcccctctgtgttcccgctagcaccctccagcaagtccacctccggcggcaccgctgctctgggctgcctcgtcaaggactacttccccgagcccgtgaccgtgtcctggaactctggcgccctgaccagcggagtgcataccttccctgccgtgctccagtcctccggcctgtacagcctgtcctctgtcgtgaccgtgccctccagctccctgggcacccagacctacatctgcaacgtgaaccacaagccctccaacaccaaagtggacaagcgggtggaacccaagtcctgcgacacccacacctgtcccccttgccctgcccctgaactgctgggcggacccagcgtgttcctgttccccccaaagcccaaggacaccctgatgatctcccggacccccgaagtgacctgcgtggtggtggacgtgtcccacgaggaccctgaagtgaagtttaattggtacgtggacggcgtggaagtgcataacgccaagaccaagcccagagaggaacagtacaactccacctaccgggtggtgtccgtgctgaccgtgctgcaccaggactggctgaacggcaaagagtacaagtgcaaggtgtccaacaaggccctgcctgcccccatcgaaaagaccatcagcaaggccaagggccagcctcgcgagccccaggtgtacaccctgccccctagccgggaagagatgaccaagaaccaggtgtccctgacctgtctggtcaagggcttctacccctccgatatcgccgtggaatgggagtccaacggccagcccgagaacaactacaagaccaccccccctgtgctggacagcgacggctcattcttcctgtactccaagctgaccgtggacaagtcccggtggcagcagggcaacgtgttctcctgctccgtgatgcacgaggccctgcacaaccactacacccagaagtccctgtccctgtctcccggcaagtctggcggaggatccgaagtgcagctgctggaaagcggcggaggactggtgcagcctggaggcagcctgagactgtcttgcgccgccagcggcttcaccttcagcggctacatcatggcctgggtccgacaggctccaggcaagggcctggaatgggtgtcctacatctaccccagcggcggcatcaccgtgtacgccgacagcgtgaagggccggttcaccatcagccgggacaacagcaagaacaccctgtacctgcagatgaacagcctgcgggccgaggacaccgccgtgtactactgcacccggcagcggtacagaggccccaagtactactactacatggacgtgtggggcaagggcaccaccgtgaccgtgtctagcggaggcggaggatctggcggaggtggaagtggtggtggcggaagtggcggcggaggcagcgacatccagatgacccagagccccctgagcctgcccgtgacacctggcgagcctgccagcatcagctgcagaagcagccagagcctgctgcacagcaacggctacaactacctggactggtatctgcagaagcccggccagtccccccagctgctgatctacctgggcagcaacagagccagcggcgtgcccgacagattcagcggcagcggctccggcaccgacttcaccctgaagatcagccgggtggaagccgaggacgtgggcgtgtactattgcatgcaggccctgcagacccggaccttcggccagggcaccaaggtggaaatcaagagatgaatctaga

SEQ ID NO: 29 - DNA, 3535 bp, Artificial Sequence
  Synthetic Polynucleotide
atgggatggtcctgcatcatcctgtttctggtggctacagccacaggcgtgcactccgacatccagatgacccagtccccctccaccctgtccgcctctgtgggcgacagagtgaccatcacctgtcgggcctcccagtccatctccagctggctggcctggtatcagcagaagcccggcaaggcccccaagctgctgatctacaaggccagcaccctggaatccggcgtgccctccagattctccggctctggctccggcaccgagttcaccctgaccatcagctccctgcagcccgacgacttcgccacctactactgccagcagtacaacacctactggaccttcggccagggcaccaaggtggaaatcaagcggaccgtggccgctccctccgtgttcatcttcccaccctccgacgagcagctgaagtccggcaccgcctccgtggtctgcctgctgaacaacttctacccccgcgaggccaaggtgcagtggaaggtggacaacgccctgcagtccggcaactcccaggaatccgtgaccgagcaggactccaaggacagcacctactccctgtcctctaccctgaccctgtccaaggccgactacgagaagcacaaggtgtacgcctgcgaagtgacccaccagggcctgtccagccccgtgaccaagtccttcaaccggggcgagtgctgatgaggcgcgccttcgcgtcgagcatgcatctagggcggccaattccgcccctctccccccccccccctaacgttactggccgaagccgcttggaataaggccggtgtgcgtttgtctatatgttattttccaccatattgccgtcttttggcaatgtgagggcccggaaacctggccctgtcttcttgacgagcattcctaggggtctttcccctctcgccaaaggaatgcaaggtctgttgaatgtcgtgaaggaagcagttcctctggaagcttcttgaagacaaacaacgtctgtagcgaccctttgcaggcagcggaaccccccacctggcgacaggtgcctctgcggccaaaagccacgtgtataagatacacctgcaaaggcggcacaaccccagtgccacgttgtgagttggatagttgtggaaagagtcaaatggctctcttcaagcgtattcaacaaggggctgaaggatgcccagaaggtaccccattgtatgggatctgatctggggcctcggtgcagatgctttacatgtgtttagtcgaggttaaaaaaacgtctaggccccccgaaccacggggacgtggttttcctttgaaaaacacgatgataatatggccacaaccatgggatggtcctgcatcatcctgtttctggtggccacagccacaggcgctcactccgaggtgcaattgctggaatccggcggaggactggtgcagcctggcggctccctgagactgtcttgcgccgcctccggcttcaccttctcccactacatcatgatgtgggtgcgacaggctcctggcaaggggctggaatgggtgtccggcatctactcctccggcggcatcaccgtgtacgccgactccgtgaagggccggttcaccatctctcgggacaactccaagaacaccctgtacctgcagatgaactccctgcgggccgaggacaccgccgtgtactactgcgcctaccggcggatcggcgtgcccagacgggacgagttcgacatctgggggcagggcaccatggtgacagtgtcctccgcctccaccaagggcccctctgtgttcccgctagcaccctccagcaagtccacctccggcggcaccgctgctctgggctgcctcgtcaaggactacttccccgagcccgtgaccgtgtcctggaactctggcgccctgaccagcggagtgcataccttccctgccgtgctccagtcctccggcctgtacagcctgtcctctgtcgtgaccgtgccctccagctccctgggcacccagacctacatctgcaacgtgaaccacaagccctccaacaccaaagtggacaagcgggtggaacccaagtcctgcgacacccacacctgtcccccttgccctgcccctgaactgctgggcggacccagcgtgttcctgttccccccaaagcccaaggacaccctgatgatctcccggacccccgaagtgacctgcgtggtggtggacgtgtcccacgaggaccctgaagtgaagtttaattggtacgtggacggcgtggaagtgcataacgccaagaccaagcccagagaggaacagtacaactccacctaccgggtggtgtccgtgctgaccgtgctgcaccaggactggctgaacggcaaagagtacaagtgcaaggtgtccaacaaggccctgcctgcccccatcgaaaagaccatcagcaaggccaagggccagcctcgcgagccccaggtgtacaccctgccccctagccgggaagagatgaccaagaaccaggtgtccctgacctgtctggtcaagggcttctacccctccgatatcgccgtggaatgggagtccaacggccagcccgagaacaactacaagaccaccccccctgtgctggacagcgacggctcattcttcctgtactccaagctgaccgtggacaagtcccggtggcagcagggcaacgtgttctcctgctccgtgatgcacgaggccctgcacaaccactacacccagaagtccctgtccctgtctcccggcaagtctggcggaggatccgacatccagatgacccagagccccctgagcctgcccgtgacacctggcgagcctgccagcatcagctgcagaagcagccagagcctgctgcacagcaacggctacaactacctggactggtatctgcagaagcccggccagtccccccagctgctgatctacctgggcagcaacagagccagcggcgtgcccgacagattcagcggcagcggctccggcaccgacttcaccctgaagatcagccgggtcgaagccgaggacgtgggcgtgtactactgcatgcaggccctgcagacccggaccttcggccagggcaccaaggtggaaatcaagcggacaggcggcggaggctctggcggaggtggaagcggaggcggaggaagtggcggaggcggctctgaggtgcagctgctggaatctggcggcggactggtgcagcctggcggcagcctgagactgtcttgcgccgccagcggcttcaccttcagcggctacatcatggcctgggtccgacaggcccctggcaagggcctggaatgggtgtcctacatctaccccagcggcggcatcaccgtgtacgccgacagcgtgaagggccggttcaccatcagccgggacaacagcaagaacaccctgtacctgcagatgaacagcctgcgggccgaggacaccgccgtgtactattgcacccggcagcggtacagaggccccaagtactactactacatggacgtgtggggcaagggcaccaccgtgaccgtgtccagctgaatctaga

SEQ ID NO: 30 - DNA, 3535 bp, Artificial Sequence
  Synthetic Polynucleotide
atgggatggtcctgcatcatcctgtttctggtggctacagccacaggcgtgcactccgacatccagatgacccagtccccctccaccctgtccgcctctgtgggcgacagagtgaccatcacctgtcgggcctcccagtccatctccagctggctggcctggtatcagcagaagcccggcaaggcccccaagctgctgatctacaaggccagcaccctggaatccggcgtgccctccagattctccggctctggctccggcaccgagttcaccctgaccatcagctccctgcagcccgacgacttcgccacctactactgccagcagtacaacacctactggaccttcggccagggcaccaaggtggaaatcaagcggaccgtggccgctccctccgtgttcatcttcccaccctccgacgagcagctgaagtccggcaccgcctccgtggtctgcctgctgaacaacttctacccccgcgaggccaaggtgcagtggaaggtggacaacgccctgcagtccggcaactcccaggaatccgtgaccgagcaggactccaaggacagcacctactccctgtcctctaccctgaccctgtccaaggccgactacgagaagcacaaggtgtacgcctgcgaagtgacccaccagggcctgtccagccccgtgaccaagtccttcaaccggggcgagtgctgatgaggcgcgccttcgcgtcgagcatgcatctagggcggccaattccgcccctctccccccccccccctaacgttactggccgaagccgcttggaataaggccggtgtgcgtttgtctatatgttattttccaccatattgccgtcttttggcaatgtgagggcccggaaacctggccctgtcttcttgacgagcattcctaggggtctttcccctctcgccaaaggaatgcaaggtctgttgaatgtcgtgaaggaagcagttcctctggaagcttcttgaagacaaacaacgtctgtagcgaccctttgcaggcagcggaaccccccacctggcgacaggtgcctctgcggccaaaagccacgtgtataagatacacctgcaaaggcggcacaaccccagtgccacgttgtgagttggatagttgtggaaagagtcaaatggctctcttcaagcgtattcaacaaggggctgaaggatgcccagaaggtaccccattgtatgggatctgatctggggcctcggtgcagatgctttacatgtgtttagtcgaggttaaaaaaacgtctaggccccccgaaccacggggacgtggttttcctttgaaaaacacgatgataatatggccacaaccatgggatggtcctgcatcatcctgtttctggtggccacagccacaggcgctcactccgaggtgcaattgctggaatccggcggaggactggtgcagcctggcggctccctgagactgtcttgcgccgcctccggcttcaccttctcccactacatcatgatgtgggtgcgacaggctcctggcaaggggctggaatgggtgtccggcatctactcctccggcggcatcaccgtgtacgccgactccgtgaagggccggttcaccatctctcgggacaactccaagaacaccctgtacctgcagatgaactccctgcgggccgaggacaccgccgtgtactactgcgcctaccggcggatcggcgtgcccagacgggacgagttcgacatctgggggcagggcaccatggtgacagtgtcctccgcctccaccaagggcccctctgtgttcccgctagcaccctccagcaagtccacctccggcggcaccgctgctctgggctgcctcgtcaaggactacttccccgagcccgtgaccgtgtcctggaactctggcgccctgaccagcggagtgcataccttccctgccgtgctccagtcctccggcctgtacagcctgtcctctgtcgtgaccgtgccctccagctccctgggcacccagacctacatctgcaacgtgaaccacaagccctccaacaccaaagtggacaagcgggtggaacccaagtcctgcgacacccacacctgtcccccttgccctgcccctgaactgctgggcggacccagcgtgttcctgttccccccaaagcccaaggacaccctgatgatctcccggacccccgaagtgacctgcgtggtggtggacgtgtcccacgaggaccctgaagtgaagtttaattggtacgtggacggcgtggaagtgcataacgccaagaccaagcccagagaggaacagtacaactccacctaccgggtggtgtccgtgctgaccgtgctgcaccaggactggctgaacggcaaagagtacaagtgcaaggtgtccaacaaggccctgcctgcccccatcgaaaagaccatcagcaaggccaagggccagcctcgcgagccccaggtgtacaccctgccccctagccgggaagagatgaccaagaaccaggtgtccctgacctgtctggtcaagggcttctacccctccgatatcgccgtggaatgggagtccaacggccagcccgagaacaactacaagaccaccccccctgtgctggacagcgacggctcattcttcctgtactccaagctgaccgtggacaagtcccggtggcagcagggcaacgtgttctcctgctccgtgatgcacgaggccctgcacaaccactacacccagaagtccctgtccctgtctcccggcaagtctggcggaggatccgaagtgcagctgctggaaagcggcggaggactggtgcagcctggaggcagcctgagactgtcttgcgccgccagcggcttcaccttcagcggctacatcatggcctgggtccgacaggctccaggcaagggcctggaatgggtgtcctacatctaccccagcggcggcatcaccgtgtacgccgacagcgtgaagggccggttcaccatcagccgggacaacagcaagaacaccctgtacctgcagatgaacagcctgcgggccgaggacaccgccgtgtactactgcacccggcagcggtacagaggccccaagtactactactacatggacgtgtggggcaagggcaccaccgtgaccgtgtctagcggaggcggaggatctggcggaggtggaagtggtggtggcggaagtggcggcggaggcagcgacatccagatgacccagagccccctgagcctgcccgtgacacctggcgagcctgccagcatcagctgcagaagcagccagagcctgctgcacagcaacggctacaactacctggactggtatctgcagaagcccggccagtccccccagatcatgatctacctgggcagcaacagagccagcggcgtgcccgacagattcagcggcagcggctccggcaccgacttcaccctgaagatcagccgggtggaagccgaggacgtgggcgtgtactattgcatgcaggccctgcagacccccagaaccttcggccagggcaccaaggtggaaatcaagagatgaatctaga

SEQ ID NO: 31 - DNA, 3538 bp, Artificial Sequence
  Synthetic Polynucleotide
atgggatggtcctgcatcatcctgtttctggtggctacagccacaggcgtgcactccgacatccagatgacccagtccccctccaccctgtccgcctctgtgggcgacagagtgaccatcacctgtcgggcctcccagtccatctccagctggctggcctggtatcagcagaagcccggcaaggcccccaagctgctgatctacaaggccagcaccctggaatccggcgtgccctccagattctccggctctggctccggcaccgagttcaccctgaccatcagctccctgcagcccgacgacttcgccacctactactgccagcagtacaacacctactggaccttcggccagggcaccaaggtggaaatcaagcggaccgtggccgctccctccgtgttcatcttcccaccctccgacgagcagctgaagtccggcaccgcctccgtggtctgcctgctgaacaacttctacccccgcgaggccaaggtgcagtggaaggtggacaacgccctgcagtccggcaactcccaggaatccgtgaccgagcaggactccaaggacagcacctactccctgtcctctaccctgaccctgtccaaggccgactacgagaagcacaaggtgtacgcctgcgaagtgacccaccagggcctgtccagccccgtgaccaagtccttcaaccggggcgagtgctgatgaggcgcgccttcgcgtcgagcatgcatctagggcggccaattccgcccctctccccccccccccctaacgttactggccgaagccgcttggaataaggccggtgtgcgtttgtctatatgttattttccaccatattgccgtcttttggcaatgtgagggcccggaaacctggccctgtcttcttgacgagcattcctaggggtctttcccctctcgccaaaggaatgcaaggtctgttgaatgtcgtgaaggaagcagttcctctggaagcttcttgaagacaaacaacgtctgtagcgaccctttgcaggcagcggaaccccccacctggcgacaggtgcctctgcggccaaaagccacgtgtataagatacacctgcaaaggcggcacaaccccagtgccacgttgtgagttggatagttgtggaaagagtcaaatggctctcttcaagcgtattcaacaaggggctgaaggatgcccagaaggtaccccattgtatgggatctgatctggggcctcggtgcagatgctttacatgtgtttagtcgaggttaaaaaaacgtctaggccccccgaaccacggggacgtggttttcctttgaaaaacacgatgataatatggccacaaccatgggatggtcctgcatcatcctgtttctggtggccacagccacaggcgctcactccgaggtgcaattgctggaatccggcggaggactggtgcagcctggcggctccctgagactgtcttgcgccgcctccggcttcaccttctcccactacatcatgatgtgggtgcgacaggctcctggcaaggggctggaatgggtgtccggcatctactcctccggcggcatcaccgtgtacgccgactccgtgaagggccggttcaccatctctcgggacaactccaagaacaccctgtacctgcagatgaactccctgcgggccgaggacaccgccgtgtactactgcgcctaccggcggatcggcgtgcccagacgggacgagttcgacatctgggggcagggcaccatggtgacagtgtcctccgcctccaccaagggcccctctgtgttcccgctagcaccctccagcaagtccacctccggcggcaccgctgctctgggctgcctcgtcaaggactacttccccgagcccgtgaccgtgtcctggaactctggcgccctgaccagcggagtgcataccttccctgccgtgctccagtcctccggcctgtacagcctgtcctctgtcgtgaccgtgccctccagctccctgggcacccagacctacatctgcaacgtgaaccacaagccctccaacaccaaagtggacaagcgggtggaacccaagtcctgcgacacccacacctgtcccccttgccctgcccctgaactgctgggcggacccagcgtgttcctgttccccccaaagcccaaggacaccctgatgatctcccggacccccgaagtgacctgcgtggtggtggacgtgtcccacgaggaccctgaagtgaagtttaattggtacgtggacggcgtggaagtgcataacgccaagaccaagcccagagaggaacagtacaactccacctaccgggtggtgtccgtgctgaccgtgctgcaccaggactggctgaacggcaaagagtacaagtgcaaggtgtccaacaaggccctgcctgcccccatcgaaaagaccatcagcaaggccaagggccagcctcgcgagccccaggtgtacaccctgccccctagccgggaagagatgaccaagaaccaggtgtccctgacctgtctggtcaagggcttctacccctccgatatcgccgtggaatgggagtccaacggccagcccgagaacaactacaagaccaccccccctgtgctggacagcgacggctcattcttcctgtactccaagctgaccgtggacaagtcccggtggcagcagggcaacgtgttctcctgctccgtgatgcacgaggccctgcacaaccactacacccagaagtccctgtccctgtctcccggcaagtctggcggaggatccgacatccagatgacccagagccccctgagcctgcccgtgacacctggcgagcctgccagcatcagctgcagaagcagccagagcctgctgcacagcaacggctacaactacctggactggtatctgcagaagcccggccagtccccccagatcatgatctacctgggcagcaacagagccagcggcgtgcccgacagattcagcggcagcggctccggcaccgacttcaccctgaagatcagccgggtcgaagccgaggacgtgggcgtgtactactgcatgcaggccctgcagacccccagaaccttcggccagggcaccaaggtggaaatcaagcggacaggcggcggaggctctggcggaggtggaagcggaggcggaggaagtggcggaggcggctctgaggtgcagctgctggaatctggcggcggactggtgcagcctggcggcagcctgagactgtcttgcgccgccagcggcttcaccttcagcggctacatcatggcctgggtccgacaggcccctggcaagggcctggaatgggtgtcctacatctaccccagcggcggcatcaccgtgtacgccgacagcgtgaagggccggttcaccatcagccgggacaacagcaagaacaccctgtacctgcagatgaacagcctgcgggccgaggacaccgccgtgtactattgcacccggcagcggtacagaggccccaagtactactactacatggacgtgtggggcaagggcaccaccgtgaccgtgtccagctgaatctaga

SEQ ID NO: 32 - DNA, 3535 bp, Artificial Sequence
  Synthetic Polynucleotide
atgggatggtcctgcatcatcctgtttctggtggctacagccacaggcgtgcactccgacatccagatgacccagtccccctccaccctgtccgcctctgtgggcgacagagtgaccatcacctgtcgggcctcccagtccatctccagctggctggcctggtatcagcagaagcccggcaaggcccccaagctgctgatctacaaggccagcaccctggaatccggcgtgccctccagattctccggctctggctccggcaccgagttcaccctgaccatcagctccctgcagcccgacgacttcgccacctactactgccagcagtacaacacctactggaccttcggccagggcaccaaggtggaaatcaagcggaccgtggccgctccctccgtgttcatcttcccaccctccgacgagcagctgaagtccggcaccgcctccgtggtctgcctgctgaacaacttctacccccgcgaggccaaggtgcagtggaaggtggacaacgccctgcagtccggcaactcccaggaatccgtgaccgagcaggactccaaggacagcacctactccctgtcctctaccctgaccctgtccaaggccgactacgagaagcacaaggtgtacgcctgcgaagtgacccaccagggcctgtccagccccgtgaccaagtccttcaaccggggcgagtgctgatgaggcgcgccttcgcgtcgagcatgcatctagggcggccaattccgcccctctccccccccccccctaacgttactggccgaagccgcttggaataaggccggtgtgcgtttgtctatatgttattttccaccatattgccgtcttttggcaatgtgagggcccggaaacctggccctgtcttcttgacgagcattcctaggggtctttcccctctcgccaaaggaatgcaaggtctgttgaatgtcgtgaaggaagcagttcctctggaagcttcttgaagacaaacaacgtctgtagcgaccctttgcaggcagcggaaccccccacctggcgacaggtgcctctgcggccaaaagccacgtgtataagatacacctgcaaaggcggcacaaccccagtgccacgttgtgagttggatagttgtggaaagagtcaaatggctctcttcaagcgtattcaacaaggggctgaaggatgcccagaaggtaccccattgtatgggatctgatctggggcctcggtgcagatgctttacatgtgtttagtcgaggttaaaaaaacgtctaggccccccgaaccacggggacgtggttttcctttgaaaaacacgatgataatatggccacaaccatgggatggtcctgcatcatcctgtttctggtggccacagccacaggcgctcactccgaggtgcaattgctggaatccggcggaggactggtgcagcctggcggctccctgagactgtcttgcgccgcctccggcttcaccttctcccactacatcatgatgtgggtgcgacaggctcctggcaaggggctggaatgggtgtccggcatctactcctccggcggcatcaccgtgtacgccgactccgtgaagggccggttcaccatctctcgggacaactccaagaacaccctgtacctgcagatgaactccctgcgggccgaggacaccgccgtgtactactgcgcctaccggcggatcggcgtgcccagacgggacgagttcgacatctgggggcagggcaccatggtgacagtgtcctccgcctccaccaagggcccctctgtgttcccgctagcaccctccagcaagtccacctccggcggcaccgctgctctgggctgcctcgtcaaggactacttccccgagcccgtgaccgtgtcctggaactctggcgccctgaccagcggagtgcataccttccctgccgtgctccagtcctccggcctgtacagcctgtcctctgtcgtgaccgtgccctccagctccctgggcacccagacctacatctgcaacgtgaaccacaagccctccaacaccaaagtggacaagcgggtggaacccaagtcctgcgacacccacacctgtcccccttgccctgcccctgaactgctgggcggacccagcgtgttcctgttccccccaaagcccaaggacaccctgatgatctcccggacccccgaagtgacctgcgtggtggtggacgtgtcccacgaggaccctgaagtgaagtttaattggtacgtggacggcgtggaagtgcataacgccaagaccaagcccagagaggaacagtacaactccacctaccgggtggtgtccgtgctgaccgtgctgcaccaggactggctgaacggcaaagagtacaagtgcaaggtgtccaacaaggccctgcctgcccccatcgaaaagaccatcagcaaggccaagggccagcctcgcgagccccaggtgtacaccctgccccctagccgggaagagatgaccaagaaccaggtgtccctgacctgtctggtcaagggcttctacccctccgatatcgccgtggaatgggagtccaacggccagcccgagaacaactacaagaccaccccccctgtgctggacagcgacggctcattcttcctgtactccaagctgaccgtggacaagtcccggtggcagcagggcaacgtgttctcctgctccgtgatgcacgaggccctgcacaaccactacacccagaagtccctgtccctgtctcccggcaagtctggcggaggatccgaagtgcagctgctggaaagcggcggaggactggtgcagcctggaggcagcctgagactgtcttgcgccgccagcggcttcaccttcagcggctacatcatggcctgggtccgacaggctccaggcaagggcctggaatgggtgtcctacatctaccccagcggcggcatcaccgtgtacgccgacagcgtgaagggccggttcaccatcagccgggacaacagcaagaacaccctgtacctgcagatgaacagcctgcgggccgaggacaccgccgtgtactactgcacccggcagcggtacagaggccccaagtactactactacatggacgtgtggggcaagggcaccaccgtgaccgtgtctagcggaggcggaggatctggcggaggtggaagtggtggtggcggaagtggcggcggaggcagcgacatccagatgacccagagccccctgagcctgcccgtgacacctggcgagcctgccagcatcagctgcagaagcagccagagcctgctgcacagcaacggctacaactacctggactggtatctgcagaagcccggccagtccccccagctgctgatctacctgggcagcaacagagccagcggcgtgcccgacagattcagcggcagcggctccggcaccgacttcaccctgaagatcagccgggtggaagccgaggacgtgggcgtgtactattgcatgcaggccctgcagaccccctggaccttcggccagggcaccaaggtggaaatcaagagatgaatctaga

SEQ ID NO: 33 - DNA, 3538 bp, Artificial Sequence
  Synthetic Polynucleotide
atgggatggtcctgcatcatcctgtttctggtggctacagccacaggcgtgcactccgacatccagatgacccagtccccctccaccctgtccgcctctgtgggcgacagagtgaccatcacctgtcgggcctcccagtccatctccagctggctggcctggtatcagcagaagcccggcaaggcccccaagctgctgatctacaaggccagcaccctggaatccggcgtgccctccagattctccggctctggctccggcaccgagttcaccctgaccatcagctccctgcagcccgacgacttcgccacctactactgccagcagtacaacacctactggaccttcggccagggcaccaaggtggaaatcaagcggaccgtggccgctccctccgtgttcatcttcccaccctccgacgagcagctgaagtccggcaccgcctccgtggtctgcctgctgaacaacttctacccccgcgaggccaaggtgcagtggaaggtggacaacgccctgcagtccggcaactcccaggaatccgtgaccgagcaggactccaaggacagcacctactccctgtcctctaccctgaccctgtccaaggccgactacgagaagcacaaggtgtacgcctgcgaagtgacccaccagggcctgtccagccccgtgaccaagtccttcaaccggggcgagtgctgatgaggcgcgccttcgcgtcgagcatgcatctagggcggccaattccgcccctctccccccccccccctaacgttactggccgaagccgcttggaataaggccggtgtgcgtttgtctatatgttattttccaccatattgccgtcttttggcaatgtgagggcccggaaacctggccctgtcttcttgacgagcattcctaggggtctttcccctctcgccaaaggaatgcaaggtctgttgaatgtcgtgaaggaagcagttcctctggaagcttcttgaagacaaacaacgtctgtagcgaccctttgcaggcagcggaaccccccacctggcgacaggtgcctctgcggccaaaagccacgtgtataagatacacctgcaaaggcggcacaaccccagtgccacgttgtgagttggatagttgtggaaagagtcaaatggctctcttcaagcgtattcaacaaggggctgaaggatgcccagaaggtaccccattgtatgggatctgatctggggcctcggtgcagatgctttacatgtgtttagtcgaggttaaaaaaacgtctaggccccccgaaccacggggacgtggttttcctttgaaaaacacgatgataatatggccacaaccatgggatggtcctgcatcatcctgtttctggtggccacagccacaggcgctcactccgaggtgcaattgctggaatccggcggaggactggtgcagcctggcggctccctgagactgtcttgcgccgcctccggcttcaccttctcccactacatcatgatgtgggtgcgacaggctcctggcaaggggctggaatgggtgtccggcatctactcctccggcggcatcaccgtgtacgccgactccgtgaagggccggttcaccatctctcgggacaactccaagaacaccctgtacctgcagatgaactccctgcgggccgaggacaccgccgtgtactactgcgcctaccggcggatcggcgtgcccagacgggacgagttcgacatctgggggcagggcaccatggtgacagtgtcctccgcctccaccaagggcccctctgtgttcccgctagcaccctccagcaagtccacctccggcggcaccgctgctctgggctgcctcgtcaaggactacttccccgagcccgtgaccgtgtcctggaactctggcgccctgaccagcggagtgcataccttccctgccgtgctccagtcctccggcctgtacagcctgtcctctgtcgtgaccgtgccctccagctccctgggcacccagacctacatctgcaacgtgaaccacaagccctccaacaccaaagtggacaagcgggtggaacccaagtcctgcgacacccacacctgtcccccttgccctgcccctgaactgctgggcggacccagcgtgttcctgttccccccaaagcccaaggacaccctgatgatctcccggacccccgaagtgacctgcgtggtggtggacgtgtcccacgaggaccctgaagtgaagtttaattggtacgtggacggcgtggaagtgcataacgccaagaccaagcccagagaggaacagtacaactccacctaccgggtggtgtccgtgctgaccgtgctgcaccaggactggctgaacggcaaagagtacaagtgcaaggtgtccaacaaggccctgcctgcccccatcgaaaagaccatcagcaaggccaagggccagcctcgcgagccccaggtgtacaccctgccccctagccgggaagagatgaccaagaaccaggtgtccctgacctgtctggtcaagggcttctacccctccgatatcgccgtggaatgggagtccaacggccagcccgagaacaactacaagaccaccccccctgtgctggacagcgacggctcattcttcctgtactccaagctgaccgtggacaagtcccggtggcagcagggcaacgtgttctcctgctccgtgatgcacgaggccctgcacaaccactacacccagaagtccctgtccctgtctcccggcaagtctggcggaggatccgacatccagatgacccagagccccctgagcctgcccgtgacacctggcgagcctgccagcatcagctgcagaagcagccagagcctgctgcacagcaacggctacaactacctggactggtatctgcagaagcccggccagtccccccagctgctgatctacctgggcagcaacagagccagcggcgtgcccgacagattcagcggcagcggctccggcaccgacttcaccctgaagatcagccgggtcgaagccgaggacgtgggcgtgtactactgcatgcaggccctgcagaccccctggaccttcggccagggcaccaaggtggaaatcaagcggacaggcggcggaggctctggcggaggtggaagcggaggcggaggaagtggcggaggcggctctgaggtgcagctgctggaatctggcggcggactggtgcagcctggcggcagcctgagactgtcttgcgccgccagcggcttcaccttcagcggctacatcatggcctgggtccgacaggcccctggcaagggcctggaatgggtgtcctacatctaccccagcggcggcatcaccgtgtacgccgacagcgtgaagggccggttcaccatcagccgggacaacagcaagaacaccctgtacctgcagatgaacagcctgcgggccgaggacaccgccgtgtactattgcacccggcagcggtacagaggccccaagtactactactacatggacgtgtggggcaagggcaccaccgtgaccgtgtccagctgaatctaga

SEQ ID NO: 34 - protein, 16 aa, Artificial Sequence
  Synthetic Polypeptide
RSSQSLLHSNGYNYLD

SEQ ID NO: 35 - protein, 16 aa, Artificial Sequence
  Synthetic Polypeptide
RSSQSLLHRNGHNYLD

SEQ ID NO: 36 - protein, 7 aa, Artificial Sequence
  Synthetic Polypeptide
LGSNRAS

SEQ ID NO: 37 - protein, 9 aa, Artificial Sequence
  Synthetic Polypeptide
MQALQTPWT

SEQ ID NO: 38 - protein, 8 aa, Artificial Sequence
  Synthetic Polypeptide
MQALQART

SEQ ID NO: 39 - protein, 8 aa, Artificial Sequence
  Synthetic Polypeptide
MQALQTRT

SEQ ID NO: 40 - protein, 9 aa, Artificial Sequence
  Synthetic Polypeptide
MQALQTPRT

SEQ ID NO: 41 - protein, 5 aa, Artificial Sequence
  Synthetic Polypeptide
GYIMA

SEQ ID NO: 42 - protein, 5 aa, Artificial Sequence
  Synthetic Polypeptide
FYSMH

SEQ ID NO: 43 - protein, 17 aa, Artificial Sequence
  Synthetic Polypeptide
YIYPSGGITVYADSVKG

SEQ ID NO: 44 - protein, 17 aa, Artificial Sequence
  Synthetic Polypeptide
RIYPSGGVTKYADSVKG

SEQ ID NO: 45 - protein, 14 aa, Artificial Sequence
  Synthetic Polypeptide
QRYRGPKYYYYMDV

SEQ ID NO: 46 - protein, 213 aa, Artificial Sequence
  Synthetic Polypeptide
DIQMTQSPSTLSASVGDRVTITCRASQSISSWLAWYQQKPGKAPKLLIYKASTLESGVPSRFSGSGSGTEFTLTISSLQPDDFATYYCQQYNTYWTFGQGTKVEIKRTVAAPSVFIFPPSDEQLKSGTASVVCLLNNFYPREAKVQWKVDNALQSGNSQESVTEQDSKDSTYSLSSTLTLSKADYEKHKVYACEVTHQGLSSPVTKSFNRGEC

SEQ ID NO: 47 - protein, 713 aa, Artificial Sequence
  Synthetic Polypeptide
EVQLLESGGGLVQPGGSLRLSCAASGFTFSHYIMMWVRQAPGKGLEWVSGIYSSGGITVYADSVKGRFTISRDNSKNTLYLQMNSLRAEDTAVYYCAYRRIGVPRRDEFDIWGQGTMVTVSSASTKGPSVFPLAPSSKSTSGGTAALGCLVKDYFPEPVTVSWNSGALTSGVHTFPAVLQSSGLYSLSSVVTVPSSSLGTQTYICNVNHKPSNTKVDKRVEPKSCDKTHTCPPCPAPELLGGPSVFLFPPKPKDTLMISRTPEVTCVVVDVSHEDPEVKFNWYVDGVEVHNAKTKPREEQYNSTYRVVSVLTVLHQDWLNGKEYKCKVSNKALPAPIEKTISKAKGQPREPQVYTLPPSREEMTKNQVSLTCLVKGFYPSDIAVEWESNGQPENNYKTTPPVLDSDGSFFLYSKLTVDKSRWQQGNVFSCSVMHEALHNHYTQKSLSLSPGKSGGGSEVQLLESGGGLVQPGGSLRLSCAASGFTFSQYVMHWVRQAPGKCLEWVSSIWPSGGHTRYADSVKGRFTISRDNSKNTLYLQMNSLRAEDTAVYYCARQRYRGPKYYYYMDVWGQGTTVTVSSGGGGSGGGGSGGGGSGGGGSDIVMTQSPLSLPVTPGEPASISCRSSQSLLHSNGYNYLDWYLQKPGQSPQLLIYLGSNRASGVPDRFSGSGSGTDFTLKISRVEAEDVGVYYCMQALQTPWTFGCGTKVEIKR

SEQ ID NO: 48 - protein, 713 aa, Artificial Sequence
  Synthetic Polypeptide
EVQLLESGGGLVQPGGSLRLSCAASGFTFSHYIMMWVRQAPGKGLEWVSGIYSSGGITVYADSVKGRFTISRDNSKNTLYLQMNSLRAEDTAVYYCAYRRIGVPRRDEFDIWGQGTMVTVSSASTKGPSVFPLAPSSKSTSGGTAALGCLVKDYFPEPVTVSWNSGALTSGVHTFPAVLQSSGLYSLSSVVTVPSSSLGTQTYICNVNHKPSNTKVDKRVEPKSCDKTHTCPPCPAPELLGGPSVFLFPPKPKDTLMISRTPEVTCVVVDVSHEDPEVKFNWYVDGVEVHNAKTKPREEQYNSTYRVVSVLTVLHQDWLNGKEYKCKVSNKALPAPIEKTISKAKGQPREPQVYTLPPSREEMTKNQVSLTCLVKGFYPSDIAVEWESNGQPENNYKTTPPVLDSDGSFFLYSKLTVDKSRWQQGNVFSCSVMHEALHNHYTQKSLSLSPGKSGGGSEVQLLESGGGLVQPGGSLRLSCAASGFTFSWYVMHWVRQAPGKCLEWVSSIYPSGGKTSYADSVKGRFTISRDNSKNTLYLQMNSLRAEDTAVYYCARQRYRGPKYYYYMDVWGQGTTVTVSSGGGGSGGGGSGGGGSGGGGSDIVMTQSPLSLPVTPGEPASISCRSSQSLLHSNGYNYLDWYLQKPGQSPQLLIYLGSNRASGVPDRFSGSGSGTDFTLKISRVEAEDVGVYYCMQALQTPWTFGCGTKVEIKR

SEQ ID NO: 49 - protein, 713 aa, Artificial Sequence
  Synthetic Polypeptide
EVQLLESGGGLVQPGGSLRLSCAASGFTFSHYIMMWVRQAPGKGLEWVSGIYSSGGITVYADSVKGRFTISRDNSKNTLYLQMNSLRAEDTAVYYCAYRRIGVPRRDEFDIWGQGTMVTVSSASTKGPSVFPLAPSSKSTSGGTAALGCLVKDYFPEPVTVSWNSGALTSGVHTFPAVLQSSGLYSLSSVVTVPSSSLGTQTYICNVNHKPSNTKVDKRVEPKSCDKTHTCPPCPAPELLGGPSVFLFPPKPKDTLMISRTPEVTCVVVDVSHEDPEVKFNWYVDGVEVHNAKTKPREEQYNSTYRVVSVLTVLHQDWLNGKEYKCKVSNKALPAPIEKTISKAKGQPREPQVYTLPPSREEMTKNQVSLTCLVKGFYPSDIAVEWESNGQPENNYKTTPPVLDSDGSFFLYSKLTVDKSRWQQGNVFSCSVMHEALHNHYTQKSLSLSPGKSGGGSEVQLLESGGGLVQPGGSLRLSCAASGFTFSWYSMHWVRQAPGKCLEWVSVIYPSGGKTRYADSVKGRFTISRDNSKNTLYLQMNSLRAEDTAVYYCARQRYRGPKYYYYMDVWGQGTTVTVSSGGGGSGGGGSGGGGSGGGGSDIVMTQSPLSLPVTPGEPASISCRSSQSLLHSNGYNYLDWYLQKPGQSPQLLIYLGSNRASGVPDRFSGSGSGTDFTLKISRVEAEDVGVYYCMQALQTPWTFGCGTKVEIKR

SEQ ID NO: 50 - protein, 713 aa, Artificial Sequence
  Synthetic Polypeptide
EVQLLESGGGLVQPGGSLRLSCAASGFTFSHYIMMWVRQAPGKGLEWVSGIYSSGGITVYADSVKGRFTISRDNSKNTLYLQMNSLRAEDTAVYYCAYRRIGVPRRDEFDIWGQGTMVTVSSASTKGPSVFPLAPSSKSTSGGTAALGCLVKDYFPEPVTVSWNSGALTSGVHTFPAVLQSSGLYSLSSVVTVPSSSLGTQTYICNVNHKPSNTKVDKRVEPKSCDKTHTCPPCPAPELLGGPSVFLFPPKPKDTLMISRTPEVTCVVVDVSHEDPEVKFNWYVDGVEVHNAKTKPREEQYNSTYRVVSVLTVLHQDWLNGKEYKCKVSNKALPAPIEKTISKAKGQPREPQVYTLPPSREEMTKNQVSLTCLVKGFYPSDIAVEWESNGQPENNYKTTPPVLDSDGSFFLYSKLTVDKSRWQQGNVFSCSVMHEALHNHYTQKSLSLSPGKSGGGSEVQLLESGGGLVQPGGSLRLSCAASGFTFSHYVMHWVRQAPGKCLEWVSSIYPSGGLTKYADSVKGRFTISRDNSKNTLYLQMNSLRAEDTAVYYCARQRYRGPKYYYYMDVWGQGTTVTVSSGGGGSGGGGSGGGGSGGGGSDIVMTQSPLSLPVTPGEPASISCRSSQSLLHSNGYNYLDWYLQKPGQSPQLLIYLGSNRASGVPDRFSGSGSGTDFTLKISRVEAEDVGVYYCMQALQTPWTFGCGTKVEIKR

SEQ ID NO: 51 - protein, 713 aa, Artificial Sequence
  Synthetic Polypeptide
EVQLLESGGGLVQPGGSLRLSCAASGFTFSHYIMMWVRQAPGKGLEWVSGIYSSGGITVYADSVKGRFTISRDNSKNTLYLQMNSLRAEDTAVYYCAYRRIGVPRRDEFDIWGQGTMVTVSSASTKGPSVFPLAPSSKSTSGGTAALGCLVKDYFPEPVTVSWNSGALTSGVHTFPAVLQSSGLYSLSSVVTVPSSSLGTQTYICNVNHKPSNTKVDKRVEPKSCDKTHTCPPCPAPELLGGPSVFLFPPKPKDTLMISRTPEVTCVVVDVSHEDPEVKFNWYVDGVEVHNAKTKPREEQYNSTYRVVSVLTVLHQDWLNGKEYKCKVSNKALPAPIEKTISKAKGQPREPQVYTLPPSREEMTKNQVSLTCLVKGFYPSDIAVEWESNGQPENNYKTTPPVLDSDGSFFLYSKLTVDKSRWQQGNVFSCSVMHEALHNHYTQKSLSLSPGKSGGGSEVQLLESGGGLVQPGGSLRLSCAASGFTFSRYIMVWVRQAPGKGLEWVSRIYPSGGYTRYADSVKGRFTISRDNSKNTLYLQMNSLRAEDTAVYYCTRQRYRGPKYYYYMDVWGKGTTVTVSSGGGGSGGGGSGGGGSGGGGSDIQMTQSPLSLPVTPGEPASISCRSSQSLLHSNGYNYLDWYLQKPGQSPQLLIYLGSNRASGVPDRFSGSGSGTDFTLKISRVEAEDVGVYYCMQALQTPWTFGQGTKVEIKR

SEQ ID NO: 52 - protein, 714 aa, Artificial Sequence
  Synthetic Polypeptide
EVQLLESGGGLVQPGGSLRLSCAASGFTFSHYIMMWVRQAPGKGLEWVSGIYSSGGITVYADSVKGRFTISRDNSKNTLYLQMNSLRAEDTAVYYCAYRRIGVPRRDEFDIWGQGTMVTVSSASTKGPSVFPLAPSSKSTSGGTAALGCLVKDYFPEPVTVSWNSGALTSGVHTFPAVLQSSGLYSLSSVVTVPSSSLGTQTYICNVNHKPSNTKVDKRVEPKSCDKTHTCPPCPAPELLGGPSVFLFPPKPKDTLMISRTPEVTCVVVDVSHEDPEVKFNWYVDGVEVHNAKTKPREEQYNSTYRVVSVLTVLHQDWLNGKEYKCKVSNKALPAPIEKTISKAKGQPREPQVYTLPPSREEMTKNQVSLTCLVKGFYPSDIAVEWESNGQPENNYKTTPPVLDSDGSFFLYSKLTVDKSRWQQGNVFSCSVMHEALHNHYTQKSLSLSPGKSGGGSDIQMTQSPLSLPVTPGEPASISCRSSQSLLHSNGYNYLDWYLQKPGQSPQLLIYLGSNRASGVPDRFSGSGSGTDFTLKISRVEAEDVGVYYCMQALQTPWTFGQGTKVEIKRTGGGGSGGGGSGGGGSGGGGSEVQLLESGGGLVQPGGSLRLSCAASGFTFSRYIMVWVRQAPGKGLEWVSRIYPSGGYTRYADSVKGRFTISRDNSKNTLYLQMNSLRAEDTAVYYCTRQRYRGPKYYYYMDVWGKGTTVTVSS

SEQ ID NO: 53 - protein, 713 aa, Artificial Sequence
  Synthetic Polypeptide
EVQLLESGGGLVQPGGSLRLSCAASGFTFSHYIMMWVRQAPGKGLEWVSGIYSSGGITVYADSVKGRFTISRDNSKNTLYLQMNSLRAEDTAVYYCAYRRIGVPRRDEFDIWGQGTMVTVSSASTKGPSVFPLAPSSKSTSGGTAALGCLVKDYFPEPVTVSWNSGALTSGVHTFPAVLQSSGLYSLSSVVTVPSSSLGTQTYICNVNHKPSNTKVDKRVEPKSCDKTHTCPPCPAPELLGGPSVFLFPPKPKDTLMISRTPEVTCVVVDVSHEDPEVKFNWYVDGVEVHNAKTKPREEQYNSTYRVVSVLTVLHQDWLNGKEYKCKVSNKALPAPIEKTISKAKGQPREPQVYTLPPSREEMTKNQVSLTCLVKGFYPSDIAVEWESNGQPENNYKTTPPVLDSDGSFFLYSKLTVDKSRWQQGNVFSCSVMHEALHNHYTQKSLSLSPGKSGGGSEVQLLESGGGLVQPGGSLRLSCAASGFTFSFYHMHWVRQAPGKGLEWVSRIVPSGGMTRYADSVKGRFTISRDNSKNTLYLQMNSLRAEDTAVYYCTRQRYRGPKYYYYMDVWGKGTTVTVSSGGGGSGGGGSGGGGSGGGGSDIQMTQSPLSLPVTPGEPASISCRSSQSLLHSNGYNYLDWYLQKPGQSPQLLIYLGSNRASGVPDRFSGSGSGTDFTLKISRVEAEDVGVYYCMQALQTPWTFGQGTKVEIKR

SEQ ID NO: 54 - protein, 714 aa, Artificial Sequence
  Synthetic Polypeptide
EVQLLESGGGLVQPGGSLRLSCAASGFTFSHYIMMWVRQAPGKGLEWVSGIYSSGGITVYADSVKGRFTISRDNSKNTLYLQMNSLRAEDTAVYYCAYRRIGVPRRDEFDIWGQGTMVTVSSASTKGPSVFPLAPSSKSTSGGTAALGCLVKDYFPEPVTVSWNSGALTSGVHTFPAVLQSSGLYSLSSVVTVPSSSLGTQTYICNVNHKPSNTKVDKRVEPKSCDKTHTCPPCPAPELLGGPSVFLFPPKPKDTLMISRTPEVTCVVVDVSHEDPEVKFNWYVDGVEVHNAKTKPREEQYNSTYRVVSVLTVLHQDWLNGKEYKCKVSNKALPAPIEKTISKAKGQPREPQVYTLPPSREEMTKNQVSLTCLVKGFYPSDIAVEWESNGQPENNYKTTPPVLDSDGSFFLYSKLTVDKSRWQQGNVFSCSVMHEALHNHYTQKSLSLSPGKSGGGSDIQMTQSPLSLPVTPGEPASISCRSSQSLLHSNGYNYLDWYLQKPGQSPQLLIYLGSNRASGVPDRFSGSGSGTDFTLKISRVEAEDVGVYYCMQALQTPWTFGQGTKVEIKRTGGGGSGGGGSGGGGSGGGGSEVQLLESGGGLVQPGGSLRLSCAASGFTFSFYHMHWVRQAPGKGLEWVSRIVPSGGMTRYADSVKGRFTISRDNSKNTLYLQMNSLRAEDTAVYYCTRQRYRGPKYYYYMDVWGKGTTVTVSS

SEQ ID NO: 55 - protein, 713 aa, Artificial Sequence
  Synthetic Polypeptide
EVQLLESGGGLVQPGGSLRLSCAASGFTFSHYIMMWVRQAPGKGLEWVSGIYSSGGITVYADSVKGRFTISRDNSKNTLYLQMNSLRAEDTAVYYCAYRRIGVPRRDEFDIWGQGTMVTVSSASTKGPSVFPLAPSSKSTSGGTAALGCLVKDYFPEPVTVSWNSGALTSGVHTFPAVLQSSGLYSLSSVVTVPSSSLGTQTYICNVNHKPSNTKVDKRVEPKSCDKTHTCPPCPAPELLGGPSVFLFPPKPKDTLMISRTPEVTCVVVDVSHEDPEVKFNWYVDGVEVHNAKTKPREEQYNSTYRVVSVLTVLHQDWLNGKEYKCKVSNKALPAPIEKTISKAKGQPREPQVYTLPPSREEMTKNQVSLTCLVKGFYPSDIAVEWESNGQPENNYKTTPPVLDSDGSFFLYSKLTVDKSRWQQGNVFSCSVMHEALHNHYTQKSLSLSPGKSGGGSEVQLLESGGGLVQPGGSLRLSCAASGFTFSFYIMGWVRQAPGKGLEWVSRIYPSGGATQYADSVKGRFTISRDNSKNTLYLQMNSLRAEDTAVYYCTRQRYRGPKYYYYMDVWGKGTTVTVSSGGGGSGGGGSGGGGSGGGGSDIQMTQSPLSLPVTPGEPASISCRSSQSLLHSNGYNYLDWYLQKPGQSPQLLIYLGSNRASGVPDRFSGSGSGTDFTLKISRVEAEDVGVYYCMQALQTPWTFGQGTKVEIKR

SEQ ID NO: 56 - protein, 714 aa, Artificial Sequence
  Synthetic Polypeptide
EVQLLESGGGLVQPGGSLRLSCAASGFTFSHYIMMWVRQAPGKGLEWVSGIYSSGGITVYADSVKGRFTISRDNSKNTLYLQMNSLRAEDTAVYYCAYRRIGVPRRDEFDIWGQGTMVTVSSASTKGPSVFPLAPSSKSTSGGTAALGCLVKDYFPEPVTVSWNSGALTSGVHTFPAVLQSSGLYSLSSVVTVPSSSLGTQTYICNVNHKPSNTKVDKRVEPKSCDKTHTCPPCPAPELLGGPSVFLFPPKPKDTLMISRTPEVTCVVVDVSHEDPEVKFNWYVDGVEVHNAKTKPREEQYNSTYRVVSVLTVLHQDWLNGKEYKCKVSNKALPAPIEKTISKAKGQPREPQVYTLPPSREEMTKNQVSLTCLVKGFYPSDIAVEWESNGQPENNYKTTPPVLDSDGSFFLYSKLTVDKSRWQQGNVFSCSVMHEALHNHYTQKSLSLSPGKSGGGSDIQMTQSPLSLPVTPGEPASISCRSSQSLLHSNGYNYLDWYLQKPGQSPQLLIYLGSNRASGVPDRFSGSGSGTDFTLKISRVEAEDVGVYYCMQALQTPWTFGQGTKVEIKRTGGGGSGGGGSGGGGSGGGGSEVQLLESGGGLVQPGGSLRLSCAASGFTFSFYIMGWVRQAPGKGLEWVSRIYPSGGATQYADSVKGRFTISRDNSKNTLYLQMNSLRAEDTAVYYCTRQRYRGPKYYYYMDVWGKGTTVTVSS

SEQ ID NO: 57 - protein, 713 aa, Artificial Sequence
  Synthetic Polypeptide
EVQLLESGGGLVQPGGSLRLSCAASGFTFSHYIMMWVRQAPGKGLEWVSGIYSSGGITVYADSVKGRFTISRDNSKNTLYLQMNSLRAEDTAVYYCAYRRIGVPRRDEFDIWGQGTMVTVSSASTKGPSVFPLAPSSKSTSGGTAALGCLVKDYFPEPVTVSWNSGALTSGVHTFPAVLQSSGLYSLSSVVTVPSSSLGTQTYICNVNHKPSNTKVDKRVEPKSCDKTHTCPPCPAPELLGGPSVFLFPPKPKDTLMISRTPEVTCVVVDVSHEDPEVKFNWYVDGVEVHNAKTKPREEQYNSTYRVVSVLTVLHQDWLNGKEYKCKVSNKALPAPIEKTISKAKGQPREPQVYTLPPSREEMTKNQVSLTCLVKGFYPSDIAVEWESNGQPENNYKTTPPVLDSDGSFFLYSKLTVDKSRWQQGNVFSCSVMHEALHNHYTQKSLSLSPGKSGGGSEVQLLESGGGLVQPGGSLRLSCAASGFTFSGYIMAWVRQAPGKGLEWVSYIYPSGGITVYADSVKGRFTISRDNSKNTLYLQMNSLRAEDTAVYYCTRQRYRGPKYYYYMDVWGKGTTVTVSSGGGGSGGGGSGGGGSGGGGSDIQMTQSPLSLPVTPGEPASISCRSSQSLLHSNGYNYLDWYLQKPGQSPQLLIYLGSNRASGVPDRFSGSGSGTDFTLKISRVEAEDIGVYYCMQGRHRPYTFGQGTRLEIKR

SEQ ID NO: 58 - protein, 714 aa, Artificial Sequence
  Synthetic Polypeptide
EVQLLESGGGLVQPGGSLRLSCAASGFTFSHYIMMWVRQAPGKGLEWVSGIYSSGGITVYADSVKGRFTISRDNSKNTLYLQMNSLRAEDTAVYYCAYRRIGVPRRDEFDIWGQGTMVTVSSASTKGPSVFPLAPSSKSTSGGTAALGCLVKDYFPEPVTVSWNSGALTSGVHTFPAVLQSSGLYSLSSVVTVPSSSLGTQTYICNVNHKPSNTKVDKRVEPKSCDKTHTCPPCPAPELLGGPSVFLFPPKPKDTLMISRTPEVTCVVVDVSHEDPEVKFNWYVDGVEVHNAKTKPREEQYNSTYRVVSVLTVLHQDWLNGKEYKCKVSNKALPAPIEKTISKAKGQPREPQVYTLPPSREEMTKNQVSLTCLVKGFYPSDIAVEWESNGQPENNYKTTPPVLDSDGSFFLYSKLTVDKSRWQQGNVFSCSVMHEALHNHYTQKSLSLSPGKSGGGSDIQMTQSPLSLPVTPGEPASISCRSSQSLLHSNGYNYLDWYLQKPGQSPQLLIYLGSNRASGVPDRFSGSGSGTDFTLKISRVEAEDIGVYYCMQGRHRPYTFGQGTRLEIKRTGGGGSGGGGSGGGGSGGGGSEVQLLESGGGLVQPGGSLRLSCAASGFTFSGYIMAWVRQAPGKGLEWVSYIYPSGGITVYADSVKGRFTISRDNSKNTLYLQMNSLRAEDTAVYYCTRQRYRGPKYYYYMDVWGKGTTVTVSS

SEQ ID NO: 59 - protein, 713 aa, Artificial Sequence
  Synthetic Polypeptide
EVQLLESGGGLVQPGGSLRLSCAASGFTFSHYIMMWVRQAPGKGLEWVSGIYSSGGITVYADSVKGRFTISRDNSKNTLYLQMNSLRAEDTAVYYCAYRRIGVPRRDEFDIWGQGTMVTVSSASTKGPSVFPLAPSSKSTSGGTAALGCLVKDYFPEPVTVSWNSGALTSGVHTFPAVLQSSGLYSLSSVVTVPSSSLGTQTYICNVNHKPSNTKVDKRVEPKSCDKTHTCPPCPAPELLGGPSVFLFPPKPKDTLMISRTPEVTCVVVDVSHEDPEVKFNWYVDGVEVHNAKTKPREEQYNSTYRVVSVLTVLHQDWLNGKEYKCKVSNKALPAPIEKTISKAKGQPREPQVYTLPPSREEMTKNQVSLTCLVKGFYPSDIAVEWESNGQPENNYKTTPPVLDSDGSFFLYSKLTVDKSRWQQGNVFSCSVMHEALHNHYTQKSLSLSPGKSGGGSEVQLLESGGGLVQPGGSLRLSCAASGFTFSWYVMQWVRQAPGKGLEWVSYIYPSGGHTKYADSVKGRFTISRDNSKNTLYLQMNSLRAEDTAVYYCTRQRYRGPKYYYYMDVWGKGTTVTVSSGGGGSGGGGSGGGGSGGGGSDIQMTQSPLSLPVTPGEPASISCRSSQSLLHSNGYNYLDWYLQKPGQSPQLLIYLGSNRASGVPDRFSGSGSGTDFTLKISRVEAEDVGVYYCMQALQTPWTFGQGTKVEIKR

SEQ ID NO: 60 - protein, 714 aa, Artificial Sequence
  Synthetic Polypeptide
EVQLLESGGGLVQPGGSLRLSCAASGFTFSHYIMMWVRQAPGKGLEWVSGIYSSGGITVYADSVKGRFTISRDNSKNTLYLQMNSLRAEDTAVYYCAYRRIGVPRRDEFDIWGQGTMVTVSSASTKGPSVFPLAPSSKSTSGGTAALGCLVKDYFPEPVTVSWNSGALTSGVHTFPAVLQSSGLYSLSSVVTVPSSSLGTQTYICNVNHKPSNTKVDKRVEPKSCDKTHTCPPCPAPELLGGPSVFLFPPKPKDTLMISRTPEVTCVVVDVSHEDPEVKFNWYVDGVEVHNAKTKPREEQYNSTYRVVSVLTVLHQDWLNGKEYKCKVSNKALPAPIEKTISKAKGQPREPQVYTLPPSREEMTKNQVSLTCLVKGFYPSDIAVEWESNGQPENNYKTTPPVLDSDGSFFLYSKLTVDKSRWQQGNVFSCSVMHEALHNHYTQKSLSLSPGKSGGGSDIQMTQSPLSLPVTPGEPASISCRSSQSLLHSNGYNYLDWYLQKPGQSPQLLIYLGSNRASGVPDRFSGSGSGTDFTLKISRVEAEDVGVYYCMQALQTPWTFGQGTKVEIKRTGGGGSGGGGSGGGGSGGGGSEVQLLESGGGLVQPGGSLRLSCAASGFTFSWYVMQWVRQAPGKGLEWVSYIYPSGGHTKYADSVKGRFTISRDNSKNTLYLQMNSLRAEDTAVYYCTRQRYRGPKYYYYMDVWGKGTTVTVSS

SEQ ID NO: 61 - protein, 713 aa, Artificial Sequence
  Synthetic Polypeptide
EVQLLESGGGLVQPGGSLRLSCAASGFTFSHYIMMWVRQAPGKGLEWVSGIYSSGGITVYADSVKGRFTISRDNSKNTLYLQMNSLRAEDTAVYYCAYRRIGVPRRDEFDIWGQGTMVTVSSASTKGPSVFPLAPSSKSTSGGTAALGCLVKDYFPEPVTVSWNSGALTSGVHTFPAVLQSSGLYSLSSVVTVPSSSLGTQTYICNVNHKPSNTKVDKRVEPKSCDKTHTCPPCPAPELLGGPSVFLFPPKPKDTLMISRTPEVTCVVVDVSHEDPEVKFNWYVDGVEVHNAKTKPREEQYNSTYRVVSVLTVLHQDWLNGKEYKCKVSNKALPAPIEKTISKAKGQPREPQVYTLPPSREEMTKNQVSLTCLVKGFYPSDIAVEWESNGQPENNYKTTPPVLDSDGSFFLYSKLTVDKSRWQQGNVFSCSVMHEALHNHYTQKSLSLSPGKSGGGSEVQLLESGGGLVQPGGSLRLSCAASGFTFSMYTMNWVRQAPGKGLEWVSRIYPSGGKTLYADSVKGRFTISRDNSKNTLYLQMNSLRAEDTAVYYCTRQRYRGPKYYYYMDVWGKGTTVTVSSGGGGSGGGGSGGGGSGGGGSDIQMTQSPLSLPVTPGEPASISCRSSQSLLHSNGYNYLDWYLQKPGQSPQLLIYLGSNRASGVPDRFSGSGSGTDFTLKISRVEAEDVGVYYCMQALQTPWTFGQGTKVEIKR

SEQ ID NO: 62 - protein, 714 aa, Artificial Sequence
  Synthetic Polypeptide
EVQLLESGGGLVQPGGSLRLSCAASGFTFSHYIMMWVRQAPGKGLEWVSGIYSSGGITVYADSVKGRFTISRDNSKNTLYLQMNSLRAEDTAVYYCAYRRIGVPRRDEFDIWGQGTMVTVSSASTKGPSVFPLAPSSKSTSGGTAALGCLVKDYFPEPVTVSWNSGALTSGVHTFPAVLQSSGLYSLSSVVTVPSSSLGTQTYICNVNHKPSNTKVDKRVEPKSCDKTHTCPPCPAPELLGGPSVFLFPPKPKDTLMISRTPEVTCVVVDVSHEDPEVKFNWYVDGVEVHNAKTKPREEQYNSTYRVVSVLTVLHQDWLNGKEYKCKVSNKALPAPIEKTISKAKGQPREPQVYTLPPSREEMTKNQVSLTCLVKGFYPSDIAVEWESNGQPENNYKTTPPVLDSDGSFFLYSKLTVDKSRWQQGNVFSCSVMHEALHNHYTQKSLSLSPGKSGGGSDIQMTQSPLSLPVTPGEPASISCRSSQSLLHSNGYNYLDWYLQKPGQSPQLLIYLGSNRASGVPDRFSGSGSGTDFTLKISRVEAEDVGVYYCMQALQTPWTFGQGTKVEIKRTGGGGSGGGGSGGGGSGGGGSEVQLLESGGGLVQPGGSLRLSCAASGFTFSMYTMNWVRQAPGKGLEWVSRIYPSGGKTLYADSVKGRFTISRDNSKNTLYLQMNSLRAEDTAVYYCTRQRYRGPKYYYYMDVWGKGTTVTVSS

SEQ ID NO: 63 - protein, 713 aa, Artificial Sequence
  Synthetic Polypeptide
EVQLLESGGGLVQPGGSLRLSCAASGFTFSHYIMMWVRQAPGKGLEWVSGIYSSGGITVYADSVKGRFTISRDNSKNTLYLQMNSLRAEDTAVYYCAYRRIGVPRRDEFDIWGQGTMVTVSSASTKGPSVFPLAPSSKSTSGGTAALGCLVKDYFPEPVTVSWNSGALTSGVHTFPAVLQSSGLYSLSSVVTVPSSSLGTQTYICNVNHKPSNTKVDKRVEPKSCDKTHTCPPCPAPELLGGPSVFLFPPKPKDTLMISRTPEVTCVVVDVSHEDPEVKFNWYVDGVEVHNAKTKPREEQYNSTYRVVSVLTVLHQDWLNGKEYKCKVSNKALPAPIEKTISKAKGQPREPQVYTLPPSREEMTKNQVSLTCLVKGFYPSDIAVEWESNGQPENNYKTTPPVLDSDGSFFLYSKLTVDKSRWQQGNVFSCSVMHEALHNHYTQKSLSLSPGKSGGGSEVQLLESGGGLVQPGGSLRLSCAASGFTFSRYVMHWVRQAPGKGLEWVSSIWPSGGMTKYADSVKGRFTISRDNSKNTLYLQMNSLRAEDTAVYYCTRQRYRGPKYYYYMDVWGKGTTVTVSSGGGGSGGGGSGGGGSGGGGSDIQMTQSPLSLPVTPGEPASISCRSSQSLLHSNGYNYLDWYLQKPGQSPQLLIYLGSNRASGVPDRFSGSGSGTDFTLKISRVEAEDVGVYYCMQALQTPWTFGQGTKVEIKR

SEQ ID NO: 64 - protein, 714 aa, Artificial Sequence
  Synthetic Polypeptide
EVQLLESGGGLVQPGGSLRLSCAASGFTFSHYIMMWVRQAPGKGLEWVSGIYSSGGITVYADSVKGRFTISRDNSKNTLYLQMNSLRAEDTAVYYCAYRRIGVPRRDEFDIWGQGTMVTVSSASTKGPSVFPLAPSSKSTSGGTAALGCLVKDYFPEPVTVSWNSGALTSGVHTFPAVLQSSGLYSLSSVVTVPSSSLGTQTYICNVNHKPSNTKVDKRVEPKSCDKTHTCPPCPAPELLGGPSVFLFPPKPKDTLMISRTPEVTCVVVDVSHEDPEVKFNWYVDGVEVHNAKTKPREEQYNSTYRVVSVLTVLHQDWLNGKEYKCKVSNKALPAPIEKTISKAKGQPREPQVYTLPPSREEMTKNQVSLTCLVKGFYPSDIAVEWESNGQPENNYKTTPPVLDSDGSFFLYSKLTVDKSRWQQGNVFSCSVMHEALHNHYTQKSLSLSPGKSGGGSDIQMTQSPLSLPVTPGEPASISCRSSQSLLHSNGYNYLDWYLQKPGQSPQLLIYLGSNRASGVPDRFSGSGSGTDFTLKISRVEAEDVGVYYCMQALQTPWTFGQGTKVEIKRTGGGGSGGGGSGGGGSGGGGSEVQLLESGGGLVQPGGSLRLSCAASGFTFSRYVMHWVRQAPGKGLEWVSSIWPSGGMTKYADSVKGRFTISRDNSKNTLYLQMNSLRAEDTAVYYCTRQRYRGPKYYYYMDVWGKGTTVTVSS

SEQ ID NO: 65 - protein, 713 aa, Artificial Sequence
  Synthetic Polypeptide
EVQLLESGGGLVQPGGSLRLSCAASGFTFSHYIMMWVRQAPGKGLEWVSGIYSSGGITVYADSVKGRFTISRDNSKNTLYLQMNSLRAEDTAVYYCAYRRIGVPRRDEFDIWGQGTMVTVSSASTKGPSVFPLAPSSKSTSGGTAALGCLVKDYFPEPVTVSWNSGALTSGVHTFPAVLQSSGLYSLSSVVTVPSSSLGTQTYICNVNHKPSNTKVDKRVEPKSCDKTHTCPPCPAPELLGGPSVFLFPPKPKDTLMISRTPEVTCVVVDVSHEDPEVKFNWYVDGVEVHNAKTKPREEQYNSTYRVVSVLTVLHQDWLNGKEYKCKVSNKALPAPIEKTISKAKGQPREPQVYTLPPSREEMTKNQVSLTCLVKGFYPSDIAVEWESNGQPENNYKTTPPVLDSDGSFFLYSKLTVDKSRWQQGNVFSCSVMHEALHNHYTQKSLSLSPGKSGGGSEVQLLESGGGLVQPGGSLRLSCAASGFTFSWYIMGWVRQAPGKGLEWVSRIYPSGGTTFYADSVKGRFTISRDNSKNTLYLQMNSLRAEDTAVYYCTRQRYRGPKYYYYMDVWGKGTTVTVSSGGGGSGGGGSGGGGSGGGGSDIQMTQSPLSLPVTPGEPASISCRSSQSLLHSNGYNYLDWYLQKPGQSPQLLIYLGSNRASGVPDRFSGSGSGTDFTLKISRVEAEDVGVYYCMQALQTPWTFGQGTKVEIKR

SEQ ID NO: 66 - protein, 714 aa, Artificial Sequence
  Synthetic Polypeptide
EVQLLESGGGLVQPGGSLRLSCAASGFTFSHYIMMWVRQAPGKGLEWVSGIYSSGGITVYADSVKGRFTISRDNSKNTLYLQMNSLRAEDTAVYYCAYRRIGVPRRDEFDIWGQGTMVTVSSASTKGPSVFPLAPSSKSTSGGTAALGCLVKDYFPEPVTVSWNSGALTSGVHTFPAVLQSSGLYSLSSVVTVPSSSLGTQTYICNVNHKPSNTKVDKRVEPKSCDKTHTCPPCPAPELLGGPSVFLFPPKPKDTLMISRTPEVTCVVVDVSHEDPEVKFNWYVDGVEVHNAKTKPREEQYNSTYRVVSVLTVLHQDWLNGKEYKCKVSNKALPAPIEKTISKAKGQPREPQVYTLPPSREEMTKNQVSLTCLVKGFYPSDIAVEWESNGQPENNYKTTPPVLDSDGSFFLYSKLTVDKSRWQQGNVFSCSVMHEALHNHYTQKSLSLSPGKSGGGSDIQMTQSPLSLPVTPGEPASISCRSSQSLLHSNGYNYLDWYLQKPGQSPQLLIYLGSNRASGVPDRFSGSGSGTDFTLKISRVEAEDVGVYYCMQALQTPWTFGQGTKVEIKRTGGGGSGGGGSGGGGSGGGGSEVQLLESGGGLVQPGGSLRLSCAASGFTFSWYIMGWVRQAPGKGLEWVSRIYPSGGTTFYADSVKGRFTISRDNSKNTLYLQMNSLRAEDTAVYYCTRQRYRGPKYYYYMDVWGKGTTVTVSS

SEQ ID NO: 67 - protein, 713 aa, Artificial Sequence
  Synthetic Polypeptide
EVQLLESGGGLVQPGGSLRLSCAASGFTFSHYIMMWVRQAPGKGLEWVSGIYSSGGITVYADSVKGRFTISRDNSKNTLYLQMNSLRAEDTAVYYCAYRRIGVPRRDEFDIWGQGTMVTVSSASTKGPSVFPLAPSSKSTSGGTAALGCLVKDYFPEPVTVSWNSGALTSGVHTFPAVLQSSGLYSLSSVVTVPSSSLGTQTYICNVNHKPSNTKVDKRVEPKSCDKTHTCPPCPAPELLGGPSVFLFPPKPKDTLMISRTPEVTCVVVDVSHEDPEVKFNWYVDGVEVHNAKTKPREEQYNSTYRVVSVLTVLHQDWLNGKEYKCKVSNKALPAPIEKTISKAKGQPREPQVYTLPPSREEMTKNQVSLTCLVKGFYPSDIAVEWESNGQPENNYKTTPPVLDSDGSFFLYSKLTVDKSRWQQGNVFSCSVMHEALHNHYTQKSLSLSPGKSGGGSEVQLLESGGGLVQPGGSLRLSCAASGFTFSWYVMYWVRQAPGKGLEWVSRIYPSGGITHYADSVKGRFTISRDNSKNTLYLQMNSLRAEDTAVYYCTRQRYRGPKYYYYMDVWGKGTTVTVSSGGGGSGGGGSGGGGSGGGGSDIQMTQSPLSLPVTPGEPASISCRSSQSLLHSNGYNYLDWYLQKPGQSPQLLIYLGSNRASGVPDRFSGSGSGTDFTLKISRVEAEDVGVYYCMQALQTPWTFGQGTKVEIKR

SEQ ID NO: 68 - protein, 714 aa, Artificial Sequence
  Synthetic Polypeptide
EVQLLESGGGLVQPGGSLRLSCAASGFTFSHYIMMWVRQAPGKGLEWVSGIYSSGGITVYADSVKGRFTISRDNSKNTLYLQMNSLRAEDTAVYYCAYRRIGVPRRDEFDIWGQGTMVTVSSASTKGPSVFPLAPSSKSTSGGTAALGCLVKDYFPEPVTVSWNSGALTSGVHTFPAVLQSSGLYSLSSVVTVPSSSLGTQTYICNVNHKPSNTKVDKRVEPKSCDKTHTCPPCPAPELLGGPSVFLFPPKPKDTLMISRTPEVTCVVVDVSHEDPEVKFNWYVDGVEVHNAKTKPREEQYNSTYRVVSVLTVLHQDWLNGKEYKCKVSNKALPAPIEKTISKAKGQPREPQVYTLPPSREEMTKNQVSLTCLVKGFYPSDIAVEWESNGQPENNYKTTPPVLDSDGSFFLYSKLTVDKSRWQQGNVFSCSVMHEALHNHYTQKSLSLSPGKSGGGSDIQMTQSPLSLPVTPGEPASISCRSSQSLLHSNGYNYLDWYLQKPGQSPQLLIYLGSNRASGVPDRFSGSGSGTDFTLKISRVEAEDVGVYYCMQALQTPWTFGQGTKVEIKRTGGGGSGGGGSGGGGSGGGGSEVQLLESGGGLVQPGGSLRLSCAASGFTFSWYVMYWVRQAPGKGLEWVSRIYPSGGITHYADSVKGRFTISRDNSKNTLYLQMNSLRAEDTAVYYCTRQRYRGPKYYYYMDVWGKGTTVTVSS

SEQ ID NO: 69 - protein, 713 aa, Artificial Sequence
  Synthetic Polypeptide
EVQLLESGGGLVQPGGSLRLSCAASGFTFSHYIMMWVRQAPGKGLEWVSGIYSSGGITVYADSVKGRFTISRDNSKNTLYLQMNSLRAEDTAVYYCAYRRIGVPRRDEFDIWGQGTMVTVSSASTKGPSVFPLAPSSKSTSGGTAALGCLVKDYFPEPVTVSWNSGALTSGVHTFPAVLQSSGLYSLSSVVTVPSSSLGTQTYICNVNHKPSNTKVDKRVEPKSCDKTHTCPPCPAPELLGGPSVFLFPPKPKDTLMISRTPEVTCVVVDVSHEDPEVKFNWYVDGVEVHNAKTKPREEQYNSTYRVVSVLTVLHQDWLNGKEYKCKVSNKALPAPIEKTISKAKGQPREPQVYTLPPSREEMTKNQVSLTCLVKGFYPSDIAVEWESNGQPENNYKTTPPVLDSDGSFFLYSKLTVDKSRWQQGNVFSCSVMHEALHNHYTQKSLSLSPGKSGGGSEVQLLESGGGLVQPGGSLRLSCAASGFTFSWYNMHWVRQAPGKGLEWVSYISPSGGKTKYTDSVKGRFTISRDNSKNTLYLQMNSLRAEDTAVYYCTRQRYRGPKYYYYMDVWGKGTTVTVSSGGGGSGGGGSGGGGSGGGGSDIQMTQSPLSLPVTPGEPASISCRSSQSLLHSNGYNYLDWYLQKPGQSPQLLIYLGSNRASGVPDRFSGSGSGTDFTLKISRVEAEDVGVYYCMQALQTPWTFGQGTKVEIKR

SEQ ID NO: 70 - protein, 714 aa, Artificial Sequence
  Synthetic Polypeptide
EVQLLESGGGLVQPGGSLRLSCAASGFTFSHYIMMWVRQAPGKGLEWVSGIYSSGGITVYADSVKGRFTISRDNSKNTLYLQMNSLRAEDTAVYYCAYRRIGVPRRDEFDIWGQGTMVTVSSASTKGPSVFPLAPSSKSTSGGTAALGCLVKDYFPEPVTVSWNSGALTSGVHTFPAVLQSSGLYSLSSVVTVPSSSLGTQTYICNVNHKPSNTKVDKRVEPKSCDKTHTCPPCPAPELLGGPSVFLFPPKPKDTLMISRTPEVTCVVVDVSHEDPEVKFNWYVDGVEVHNAKTKPREEQYNSTYRVVSVLTVLHQDWLNGKEYKCKVSNKALPAPIEKTISKAKGQPREPQVYTLPPSREEMTKNQVSLTCLVKGFYPSDIAVEWESNGQPENNYKTTPPVLDSDGSFFLYSKLTVDKSRWQQGNVFSCSVMHEALHNHYTQKSLSLSPGKSGGGSDIQMTQSPLSLPVTPGEPASISCRSSQSLLHSNGYNYLDWYLQKPGQSPQLLIYLGSNRASGVPDRFSGSGSGTDFTLKISRVEAEDVGVYYCMQALQTPWTFGQGTKVEIKRTGGGGSGGGGSGGGGSGGGGSEVQLLESGGGLVQPGGSLRLSCAASGFTFSWYNMHWVRQAPGKGLEWVSYISPSGGKTKYTDSVKGRFTISRDNSKNTLYLQMNSLRAEDTAVYYCTRQRYRGPKYYYYMDVWGKGTTVTVSS

SEQ ID NO: 71 - protein, 713 aa, Artificial Sequence
  Synthetic Polypeptide
EVQLLESGGGLVQPGGSLRLSCAASGFTFSHYIMMWVRQAPGKGLEWVSGIYSSGGITVYADSVKGRFTISRDNSKNTLYLQMNSLRAEDTAVYYCAYRRIGVPRRDEFDIWGQGTMVTVSSASTKGPSVFPLAPSSKSTSGGTAALGCLVKDYFPEPVTVSWNSGALTSGVHTFPAVLQSSGLYSLSSVVTVPSSSLGTQTYICNVNHKPSNTKVDKRVEPKSCDKTHTCPPCPAPELLGGPSVFLFPPKPKDTLMISRTPEVTCVVVDVSHEDPEVKFNWYVDGVEVHNAKTKPREEQYNSTYRVVSVLTVLHQDWLNGKEYKCKVSNKALPAPIEKTISKAKGQPREPQVYTLPPSREEMTKNQVSLTCLVKGFYPSDIAVEWESNGQPENNYKTTPPVLDSDGSFFLYSKLTVDKSRWQQGNVFSCSVMHEALHNHYTQKSLSLSPGKSGGGSEVQLLESGGGLVQPGGSLRLSCAASGFTFSRYIMGWVRQAPGKGLEWVSSIYPSGGVTRYADSVKGRFTISRDNSKNTLYLQMNSLRAEDTAVYYCTRQRYRGPKYYYYMDVWGKGTTVTVSSGGGGSGGGGSGGGGSGGGGSDIQMTQSPLSLPVTPGEPASISCRSSQSLLHSNGYNYLDWYLQKPGQSPQLLIYLGSNRASGVPDRFSGSGSGTDFTLKISRVEAEDVGVYYCMQALQTPWTFGQGTKVEIKR

SEQ ID NO: 72 - protein, 714 aa, Artificial Sequence
  Synthetic Polypeptide
EVQLLESGGGLVQPGGSLRLSCAASGFTFSHYIMMWVRQAPGKGLEWVSGIYSSGGITVYADSVKGRFTISRDNSKNTLYLQMNSLRAEDTAVYYCAYRRIGVPRRDEFDIWGQGTMVTVSSASTKGPSVFPLAPSSKSTSGGTAALGCLVKDYFPEPVTVSWNSGALTSGVHTFPAVLQSSGLYSLSSVVTVPSSSLGTQTYICNVNHKPSNTKVDKRVEPKSCDKTHTCPPCPAPELLGGPSVFLFPPKPKDTLMISRTPEVTCVVVDVSHEDPEVKFNWYVDGVEVHNAKTKPREEQYNSTYRVVSVLTVLHQDWLNGKEYKCKVSNKALPAPIEKTISKAKGQPREPQVYTLPPSREEMTKNQVSLTCLVKGFYPSDIAVEWESNGQPENNYKTTPPVLDSDGSFFLYSKLTVDKSRWQQGNVFSCSVMHEALHNHYTQKSLSLSPGKSGGGSDIQMTQSPLSLPVTPGEPASISCRSSQSLLHSNGYNYLDWYLQKPGQSPQLLIYLGSNRASGVPDRFSGSGSGTDFTLKISRVEAEDVGVYYCMQALQTPWTFGQGTKVEIKRTGGGGSGGGGSGGGGSGGGGSEVQLLESGGGLVQPGGSLRLSCAASGFTFSRYIMGWVRQAPGKGLEWVSSIYPSGGVTRYADSVKGRFTISRDNSKNTLYLQMNSLRAEDTAVYYCTRQRYRGPKYYYYMDVWGKGTTVTVSS

SEQ ID NO: 73 - protein, 713 aa, Artificial Sequence
  Synthetic Polypeptide
EVQLLESGGGLVQPGGSLRLSCAASGFTFSHYIMMWVRQAPGKGLEWVSGIYSSGGITVYADSVKGRFTISRDNSKNTLYLQMNSLRAEDTAVYYCAYRRIGVPRRDEFDIWGQGTMVTVSSASTKGPSVFPLAPSSKSTSGGTAALGCLVKDYFPEPVTVSWNSGALTSGVHTFPAVLQSSGLYSLSSVVTVPSSSLGTQTYICNVNHKPSNTKVDKRVEPKSCDKTHTCPPCPAPELLGGPSVFLFPPKPKDTLMISRTPEVTCVVVDVSHEDPEVKFNWYVDGVEVHNAKTKPREEQYNSTYRVVSVLTVLHQDWLNGKEYKCKVSNKALPAPIEKTISKAKGQPREPQVYTLPPSREEMTKNQVSLTCLVKGFYPSDIAVEWESNGQPENNYKTTPPVLDSDGSFFLYSKLTVDKSRWQQGNVFSCSVMHEALHNHYTQKSLSLSPGKSGGGSEVQLLESGGGLVQPGGSLRLSCAASGFTFSRYIMHWVRQAPGKGLEWVSSIYPSGGVTKYADSVKGRFTISRDNSKNTLYLQMNSLRAEDTAVYYCTRQRYRGPKYYYYMDVWGKGTTVTVSSGGGGSGGGGSGGGGSGGGGSDIQMTQSPLSLPVTPGEPASISCRSSQSLLHSNGYNYLDWYLQKPGQSPQLLIYLGSNRASGVPDRFSGSGSGTDFTLKISRVEAEDVGVYYCMQALQTPWTFGQGTKVEIKR

SEQ ID NO: 74 - protein, 714 aa, Artificial Sequence
  Synthetic Polypeptide
EVQLLESGGGLVQPGGSLRLSCAASGFTFSHYIMMWVRQAPGKGLEWVSGIYSSGGITVYADSVKGRFTISRDNSKNTLYLQMNSLRAEDTAVYYCAYRRIGVPRRDEFDIWGQGTMVTVSSASTKGPSVFPLAPSSKSTSGGTAALGCLVKDYFPEPVTVSWNSGALTSGVHTFPAVLQSSGLYSLSSVVTVPSSSLGTQTYICNVNHKPSNTKVDKRVEPKSCDKTHTCPPCPAPELLGGPSVFLFPPKPKDTLMISRTPEVTCVVVDVSHEDPEVKFNWYVDGVEVHNAKTKPREEQYNSTYRVVSVLTVLHQDWLNGKEYKCKVSNKALPAPIEKTISKAKGQPREPQVYTLPPSREEMTKNQVSLTCLVKGFYPSDIAVEWESNGQPENNYKTTPPVLDSDGSFFLYSKLTVDKSRWQQGNVFSCSVMHEALHNHYTQKSLSLSPGKSGGGSDIQMTQSPLSLPVTPGEPASISCRSSQSLLHSNGYNYLDWYLQKPGQSPQLLIYLGSNRASGVPDRFSGSGSGTDFTLKISRVEAEDVGVYYCMQALQTPWTFGQGTKVEIKRTGGGGSGGGGSGGGGSGGGGSEVQLLESGGGLVQPGGSLRLSCAASGFTFSRYIMHWVRQAPGKGLEWVSSIYPSGGVTKYADSVKGRFTISRDNSKNTLYLQMNSLRAEDTAVYYCTRQRYRGPKYYYYMDVWGKGTTVTVSS

SEQ ID NO: 75 - protein, 713 aa, Artificial Sequence
  Synthetic Polypeptide
EVQLLESGGGLVQPGGSLRLSCAASGFTFSHYIMMWVRQAPGKGLEWVSGIYSSGGITVYADSVKGRFTISRDNSKNTLYLQMNSLRAEDTAVYYCAYRRIGVPRRDEFDIWGQGTMVTVSSASTKGPSVFPLAPSSKSTSGGTAALGCLVKDYFPEPVTVSWNSGALTSGVHTFPAVLQSSGLYSLSSVVTVPSSSLGTQTYICNVNHKPSNTKVDKRVEPKSCDKTHTCPPCPAPELLGGPSVFLFPPKPKDTLMISRTPEVTCVVVDVSHEDPEVKFNWYVDGVEVHNAKTKPREEQYNSTYRVVSVLTVLHQDWLNGKEYKCKVSNKALPAPIEKTISKAKGQPREPQVYTLPPSREEMTKNQVSLTCLVKGFYPSDIAVEWESNGQPENNYKTTPPVLDSDGSFFLYSKLTVDKSRWQQGNVFSCSVMHEALHNHYTQKSLSLSPGKSGGGSEVQLLESGGGLVQPGGSLRLSCAASGFTFSFYSMHWVRQAPGKGLEWVSRIYPSGGVTKYADSVKGRFTISRDNSKNTLYLQMNSLRAEDTAVYYCTRQRYRGPKYYYYMDVWGKGTTVTVSSGGGGSGGGGSGGGGSGGGGSDIQMTQSPLSLPVTPGEPASISCRSSQSLLHSNGYNYLDWYLQKPGQSPQLLIYLGSNRASGVPDRFSGSGSGTDFTLKISRVEAEDVGVYYCMQALQTPWTFGQGTKVEIKR

SEQ ID NO: 76 - protein, 714 aa, Artificial Sequence
  Synthetic Polypeptide
EVQLLESGGGLVQPGGSLRLSCAASGFTFSHYIMMWVRQAPGKGLEWVSGIYSSGGITVYADSVKGRFTISRDNSKNTLYLQMNSLRAEDTAVYYCAYRRIGVPRRDEFDIWGQGTMVTVSSASTKGPSVFPLAPSSKSTSGGTAALGCLVKDYFPEPVTVSWNSGALTSGVHTFPAVLQSSGLYSLSSVVTVPSSSLGTQTYICNVNHKPSNTKVDKRVEPKSCDKTHTCPPCPAPELLGGPSVFLFPPKPKDTLMISRTPEVTCVVVDVSHEDPEVKFNWYVDGVEVHNAKTKPREEQYNSTYRVVSVLTVLHQDWLNGKEYKCKVSNKALPAPIEKTISKAKGQPREPQVYTLPPSREEMTKNQVSLTCLVKGFYPSDIAVEWESNGQPENNYKTTPPVLDSDGSFFLYSKLTVDKSRWQQGNVFSCSVMHEALHNHYTQKSLSLSPGKSGGGSDIQMTQSPLSLPVTPGEPASISCRSSQSLLHSNGYNYLDWYLQKPGQSPQLLIYLGSNRASGVPDRFSGSGSGTDFTLKISRVEAEDVGVYYCMQALQTPWTFGQGTKVEIKRTGGGGSGGGGSGGGGSGGGGSEVQLLESGGGLVQPGGSLRLSCAASGFTFSFYSMHWVRQAPGKGLEWVSRIYPSGGVTKYADSVKGRFTISRDNSKNTLYLQMNSLRAEDTAVYYCTRQRYRGPKYYYYMDVWGKGTTVTVSS

SEQ ID NO: 77 - protein, 713 aa, Artificial Sequence
  Synthetic Polypeptide
EVQLLESGGGLVQPGGSLRLSCAASGFTFSHYIMMWVRQAPGKGLEWVSGIYSSGGITVYADSVKGRFTISRDNSKNTLYLQMNSLRAEDTAVYYCAYRRIGVPRRDEFDIWGQGTMVTVSSASTKGPSVFPLAPSSKSTSGGTAALGCLVKDYFPEPVTVSWNSGALTSGVHTFPAVLQSSGLYSLSSVVTVPSSSLGTQTYICNVNHKPSNTKVDKRVEPKSCDKTHTCPPCPAPELLGGPSVFLFPPKPKDTLMISRTPEVTCVVVDVSHEDPEVKFNWYVDGVEVHNAKTKPREEQYNSTYRVVSVLTVLHQDWLNGKEYKCKVSNKALPAPIEKTISKAKGQPREPQVYTLPPSREEMTKNQVSLTCLVKGFYPSDIAVEWESNGQPENNYKTTPPVLDSDGSFFLYSKLTVDKSRWQQGNVFSCSVMHEALHNHYTQKSLSLSPGKSGGGSEVQLLESGGGLVQPGGSLRLSCAASGFTFSFYVMGWVRQAPGKGLEWVSRIYPSGGLTQYADSVKGRFTISRDNSKNTLYLQMNSLRAEDTAVYYCTRQRYRGPKYYYYMDVWGKGTTVTVSSGGGGSGGGGSGGGGSGGGGSDIQMTQSPLSLPVTPGEPASISCRSSQSLLHSNGYNYLDWYLQKPGQSPQLLIYLGSNRASGVPDRFSGSGSGTDFTLKISRVEAEDVGVYYCMQALQTPWTFGQGTKVEIKR

SEQ ID NO: 78 - protein, 714 aa, Artificial Sequence
  Synthetic Polypeptide
EVQLLESGGGLVQPGGSLRLSCAASGFTFSHYIMMWVRQAPGKGLEWVSGIYSSGGITVYADSVKGRFTISRDNSKNTLYLQMNSLRAEDTAVYYCAYRRIGVPRRDEFDIWGQGTMVTVSSASTKGPSVFPLAPSSKSTSGGTAALGCLVKDYFPEPVTVSWNSGALTSGVHTFPAVLQSSGLYSLSSVVTVPSSSLGTQTYICNVNHKPSNTKVDKRVEPKSCDKTHTCPPCPAPELLGGPSVFLFPPKPKDTLMISRTPEVTCVVVDVSHEDPEVKFNWYVDGVEVHNAKTKPREEQYNSTYRVVSVLTVLHQDWLNGKEYKCKVSNKALPAPIEKTISKAKGQPREPQVYTLPPSREEMTKNQVSLTCLVKGFYPSDIAVEWESNGQPENNYKTTPPVLDSDGSFFLYSKLTVDKSRWQQGNVFSCSVMHEALHNHYTQKSLSLSPGKSGGGSDIQMTQSPLSLPVTPGEPASISCRSSQSLLHSNGYNYLDWYLQKPGQSPQLLIYLGSNRASGVPDRFSGSGSGTDFTLKISRVEAEDVGVYYCMQALQTPWTFGQGTKVEIKRTGGGGSGGGGSGGGGSGGGGSEVQLLESGGGLVQPGGSLRLSCAASGFTFSFYVMGWVRQAPGKGLEWVSRIYPSGGLTQYADSVKGRFTISRDNSKNTLYLQMNSLRAEDTAVYYCTRQRYRGPKYYYYMDVWGKGTTVTVSS

SEQ ID NO: 79 - protein, 713 aa, Artificial Sequence
  Synthetic Polypeptide
EVQLLESGGGLVQPGGSLRLSCAASGFTFSHYIMMWVRQAPGKGLEWVSGIYSSGGITVYADSVKGRFTISRDNSKNTLYLQMNSLRAEDTAVYYCAYRRIGVPRRDEFDIWGQGTMVTVSSASTKGPSVFPLAPSSKSTSGGTAALGCLVKDYFPEPVTVSWNSGALTSGVHTFPAVLQSSGLYSLSSVVTVPSSSLGTQTYICNVNHKPSNTKVDKRVEPKSCDKTHTCPPCPAPELLGGPSVFLFPPKPKDTLMISRTPEVTCVVVDVSHEDPEVKFNWYVDGVEVHNAKTKPREEQYNSTYRVVSVLTVLHQDWLNGKEYKCKVSNKALPAPIEKTISKAKGQPREPQVYTLPPSREEMTKNQVSLTCLVKGFYPSDIAVEWESNGQPENNYKTTPPVLDSDGSFFLYSKLTVDKSRWQQGNVFSCSVMHEALHNHYTQKSLSLSPGKSGGGSEVQLLESGGGLVQPGGSLRLSCAASGFTFSWYVMQWVRQAPGKGLEWVSSIWPSGGKTVYADSVKGRFTISRDNSKNTLYLQMNSLRAEDTAVYYCTRQRYRGPKYYYYMDVWGKGTTVTVSSGGGGSGGGGSGGGGSGGGGSDIQMTQSPLSLPVTPGEPASISCRSSQSLLHSNGYNYLDWYLQKPGQSPQLLIYLGSNRASGVPDRFSGSGSGTDFTLKISRVEAEDVGVYYCMQALQTPWTFGQGTKVEIKR

SEQ ID NO: 80 - protein, 714 aa, Artificial Sequence
  Synthetic Polypeptide
EVQLLESGGGLVQPGGSLRLSCAASGFTFSHYIMMWVRQAPGKGLEWVSGIYSSGGITVYADSVKGRFTISRDNSKNTLYLQMNSLRAEDTAVYYCAYRRIGVPRRDEFDIWGQGTMVTVSSASTKGPSVFPLAPSSKSTSGGTAALGCLVKDYFPEPVTVSWNSGALTSGVHTFPAVLQSSGLYSLSSVVTVPSSSLGTQTYICNVNHKPSNTKVDKRVEPKSCDKTHTCPPCPAPELLGGPSVFLFPPKPKDTLMISRTPEVTCVVVDVSHEDPEVKFNWYVDGVEVHNAKTKPREEQYNSTYRVVSVLTVLHQDWLNGKEYKCKVSNKALPAPIEKTISKAKGQPREPQVYTLPPSREEMTKNQVSLTCLVKGFYPSDIAVEWESNGQPENNYKTTPPVLDSDGSFFLYSKLTVDKSRWQQGNVFSCSVMHEALHNHYTQKSLSLSPGKSGGGSDIQMTQSPLSLPVTPGEPASISCRSSQSLLHSNGYNYLDWYLQKPGQSPQLLIYLGSNRASGVPDRFSGSGSGTDFTLKISRVEAEDVGVYYCMQALQTPWTFGQGTKVEIKRTGGGGSGGGGSGGGGSGGGGSEVQLLESGGGLVQPGGSLRLSCAASGFTFSWYVMQWVRQAPGKGLEWVSSIWPSGGKTVYADSVKGRFTISRDNSKNTLYLQMNSLRAEDTAVYYCTRQRYRGPKYYYYMDVWGKGTTVTVSS

SEQ ID NO: 81 - protein, 713 aa, Artificial Sequence
  Synthetic Polypeptide
EVQLLESGGGLVQPGGSLRLSCAASGFTFSHYIMMWVRQAPGKGLEWVSGIYSSGGITVYADSVKGRFTISRDNSKNTLYLQMNSLRAEDTAVYYCAYRRIGVPRRDEFDIWGQGTMVTVSSASTKGPSVFPLAPSSKSTSGGTAALGCLVKDYFPEPVTVSWNSGALTSGVHTFPAVLQSSGLYSLSSVVTVPSSSLGTQTYICNVNHKPSNTKVDKRVEPKSCDKTHTCPPCPAPELLGGPSVFLFPPKPKDTLMISRTPEVTCVVVDVSHEDPEVKFNWYVDGVEVHNAKTKPREEQYNSTYRVVSVLTVLHQDWLNGKEYKCKVSNKALPAPIEKTISKAKGQPREPQVYTLPPSREEMTKNQVSLTCLVKGFYPSDIAVEWESNGQPENNYKTTPPVLDSDGSFFLYSKLTVDKSRWQQGNVFSCSVMHEALHNHYTQKSLSLSPGKSGGGSEVQLLESGGGLVQPGGSLRLSCAASGFTFSWYVMHWVRQAPGKGLEWVSGIWPSGGRTKYADSVKGRFTISRDNSKNTLYLQMNSLRAEDTAVYYCTRQRYRGPKYYYYMDVWGKGTTVTVSSGGGGSGGGGSGGGGSGGGGSDIQMTQSPLSLPVTPGEPASISCRSSQSLLHSNGYNYLDWYLQKPGQSPQLLIYLGSNRASGVPDRFSGSGSGTDFTLKISRVEAEDVGVYYCMQALQTPWTFGQGTKVEIKR

SEQ ID NO: 82 - protein, 714 aa, Artificial Sequence
  Synthetic Polypeptide
EVQLLESGGGLVQPGGSLRLSCAASGFTFSHYIMMWVRQAPGKGLEWVSGIYSSGGITVYADSVKGRFTISRDNSKNTLYLQMNSLRAEDTAVYYCAYRRIGVPRRDEFDIWGQGTMVTVSSASTKGPSVFPLAPSSKSTSGGTAALGCLVKDYFPEPVTVSWNSGALTSGVHTFPAVLQSSGLYSLSSVVTVPSSSLGTQTYICNVNHKPSNTKVDKRVEPKSCDKTHTCPPCPAPELLGGPSVFLFPPKPKDTLMISRTPEVTCVVVDVSHEDPEVKFNWYVDGVEVHNAKTKPREEQYNSTYRVVSVLTVLHQDWLNGKEYKCKVSNKALPAPIEKTISKAKGQPREPQVYTLPPSREEMTKNQVSLTCLVKGFYPSDIAVEWESNGQPENNYKTTPPVLDSDGSFFLYSKLTVDKSRWQQGNVFSCSVMHEALHNHYTQKSLSLSPGKSGGGSDIQMTQSPLSLPVTPGEPASISCRSSQSLLHSNGYNYLDWYLQKPGQSPQLLIYLGSNRASGVPDRFSGSGSGTDFTLKISRVEAEDVGVYYCMQALQTPWTFGQGTKVEIKRTGGGGSGGGGSGGGGSGGGGSEVQLLESGGGLVQPGGSLRLSCAASGFTFSWYVMHWVRQAPGKGLEWVSGIWPSGGRTKYADSVKGRFTISRDNSKNTLYLQMNSLRAEDTAVYYCTRQRYRGPKYYYYMDVWGKGTTVTVSS

SEQ ID NO: 83 - protein, 713 aa, Artificial Sequence
  Synthetic Polypeptide
EVQLLESGGGLVQPGGSLRLSCAASGFTFSHYIMMWVRQAPGKGLEWVSGIYSSGGITVYADSVKGRFTISRDNSKNTLYLQMNSLRAEDTAVYYCAYRRIGVPRRDEFDIWGQGTMVTVSSASTKGPSVFPLAPSSKSTSGGTAALGCLVKDYFPEPVTVSWNSGALTSGVHTFPAVLQSSGLYSLSSVVTVPSSSLGTQTYICNVNHKPSNTKVDKRVEPKSCDKTHTCPPCPAPELLGGPSVFLFPPKPKDTLMISRTPEVTCVVVDVSHEDPEVKFNWYVDGVEVHNAKTKPREEQYNSTYRVVSVLTVLHQDWLNGKEYKCKVSNKALPAPIEKTISKAKGQPREPQVYTLPPSREEMTKNQVSLTCLVKGFYPSDIAVEWESNGQPENNYKTTPPVLDSDGSFFLYSKLTVDKSRWQQGNVFSCSVMHEALHNHYTQKSLSLSPGKSGGGSEVQLLESGGGLVQPGGSLRLSCAASGFTFSQYIMHWVRQAPGKGLEWVSSIYPSGGNTKYADSVKGRFTISRDNSKNTLYLQMNSLRAEDTAVYYCTRQRYRGPKYYYYMDVWGKGTTVTVSSGGGGSGGGGSGGGGSGGGGSDIQMTQSPLSLPVTPGEPASISCRSSQSLLHSNGYNYLDWYLQKPGQSPQLLIYLGSNRASGVPDRFSGSGSGTDFTLKISRVEAEDVGVYYCMQALQTPWTFGQGTKVEIKR

SEQ ID NO: 84 - protein, 714 aa, Artificial Sequence
  Synthetic Polypeptide
EVQLLESGGGLVQPGGSLRLSCAASGFTFSHYIMMWVRQAPGKGLEWVSGIYSSGGITVYADSVKGRFTISRDNSKNTLYLQMNSLRAEDTAVYYCAYRRIGVPRRDEFDIWGQGTMVTVSSASTKGPSVFPLAPSSKSTSGGTAALGCLVKDYFPEPVTVSWNSGALTSGVHTFPAVLQSSGLYSLSSVVTVPSSSLGTQTYICNVNHKPSNTKVDKRVEPKSCDKTHTCPPCPAPELLGGPSVFLFPPKPKDTLMISRTPEVTCVVVDVSHEDPEVKFNWYVDGVEVHNAKTKPREEQYNSTYRVVSVLTVLHQDWLNGKEYKCKVSNKALPAPIEKTISKAKGQPREPQVYTLPPSREEMTKNQVSLTCLVKGFYPSDIAVEWESNGQPENNYKTTPPVLDSDGSFFLYSKLTVDKSRWQQGNVFSCSVMHEALHNHYTQKSLSLSPGKSGGGSDIQMTQSPLSLPVTPGEPASISCRSSQSLLHSNGYNYLDWYLQKPGQSPQLLIYLGSNRASGVPDRFSGSGSGTDFTLKISRVEAEDVGVYYCMQALQTPWTFGQGTKVEIKRTGGGGSGGGGSGGGGSGGGGSEVQLLESGGGLVQPGGSLRLSCAASGFTFSQYIMHWVRQAPGKGLEWVSSIYPSGGNTKYADSVKGRFTISRDNSKNTLYLQMNSLRAEDTAVYYCTRQRYRGPKYYYYMDVWGKGTTVTVSS

SEQ ID NO: 85 - protein, 487 aa, Artificial Sequence
  Synthetic Polypeptide
EVQLLESGGGLVQPGGSLRLSCAASGFTFSHYIMMWVRQAPGKGLEWVSGIYSSGGITVYADSVKGRFTISRDNSKNTLYLQMNSLRAEDTAVYYCAYRRIGVPRRDEFDIWGQGTMVTVSSASTKGPSVFPLAPSSKSTSGGTAALGCLVKDYFPEPVTVSWNSGALTSGVHTFPAVLQSSGLYSLSSVVTVPSSSLGTQTYICNVNHKPSNTKVDKRVEPKSCDKTHTCPPCPAPELLGGPSVFLFPPKPKDTLMISRTPEVTCVVVDVSHEDPEVKFNWYVDGVEVHNAKTKPREEQYNSTYRVVSVLTVLHQDWLNGKEYKCKVSNKALPAPIEKTISKAKGQPREPQVYTLPPSREEMTKNQVSLTCLVKGFYPSDIAVEWESNGQPENNYKTTPPVLDSDGSFFLYSKLTVDKSRWQQGNVFSCSVMHEALHNHYTQKSLSLSPGKSGGGSEVQLLESGGGLVQPGGSLRLSCAASGFTFS

SEQ ID NO: 86 - protein, 621 aa, Artificial Sequence
  Synthetic Polypeptide
EVQLLESGGGLVQPGGSLRLSCAASGFTFSHYIMMWVRQAPGKGLEWVSGIYSSGGITVYADSVKGRFTISRDNSKNTLYLQMNSLRAEDTAVYYCAYRRIGVPRRDEFDIWGQGTMVTVSSASTKGPSVFPLAPSSKSTSGGTAALGCLVKDYFPEPVTVSWNSGALTSGVHTFPAVLQSSGLYSLSSVVTVPSSSLGTQTYICNVNHKPSNTKVDKRVEPKSCDKTHTCPPCPAPELLGGPSVFLFPPKPKDTLMISRTPEVTCVVVDVSHEDPEVKFNWYVDGVEVHNAKTKPREEQYNSTYRVVSVLTVLHQDWLNGKEYKCKVSNKALPAPIEKTISKAKGQPREPQVYTLPPSREEMTKNQVSLTCLVKGFYPSDIAVEWESNGQPENNYKTTPPVLDSDGSFFLYSKLTVDKSRWQQGNVFSCSVMHEALHNHYTQKSLSLSPGKSGGGSDIQMTQSPLSLPVTPGEPASISCRSSQSLLHSNGYNYLDWYLQKPGQSPQLLIYLGSNRASGVPDRFSGSGSGTDFTLKISRVEAEDVGVYYCMQALQTPWTFGQGTKVEIKRTGGGGSGGGGSGGGGSGGGGSEVQLLESGGGLVQPGGSLRLSCAASGFTFS

SEQ ID NO: 87 - protein, 713 aa, Artificial Sequence
  Synthetic Polypeptide
EVQLLESGGGLVQPGGSLRLSCAASGFTFSHYIMMWVRQAPGKGLEWVSGIYSSGGITVYADSVKGRFTISRDNSKNTLYLQMNSLRAEDTAVYYCAYRRIGVPRRDEFDIWGQGTMVTVSSASTKGPSVFPLAPSSKSTSGGTAALGCLVKDYFPEPVTVSWNSGALTSGVHTFPAVLQSSGLYSLSSVVTVPSSSLGTQTYICNVNHKPSNTKVDKRVEPKSCDKTHTCPPCPAPELLGGPSVFLFPPKPKDTLMISRTPEVTCVVVDVSHEDPEVKFNWYVDGVEVHNAKTKPREEQYNSTYRVVSVLTVLHQDWLNGKEYKCKVSNKALPAPIEKTISKAKGQPREPQVYTLPPSREEMTKNQVSLTCLVKGFYPSDIAVEWESNGQPENNYKTTPPVLDSDGSFFLYSKLTVDKSRWQQGNVFSCSVMHEALHNHYTQKSLSLSPGKSGGGSEVQLLESGGGLVQPGGSLRLSCAASGFTFSPYIMHWVRQAPGKGLEWVSRIYPSGGATVYADSVKGRFTISRDNSKNTLYLQMNSLRAEDTAVYYCTRQRYRGPKYYYYMDVWGKGTTVTVSSGGGGSGGGGSGGGGSGGGGSDIQMTQSPLSLPVTPGEPASISCRSSQSLLHSNGYNYLDWYLQKPGQSPQLLIYLGSNRASGVPDRFSGSGSGTDFTLKISRVEAEDVGVYYCMQALQTPWTFGQGTKVEIKR

SEQ ID NO: 88 - protein, 714 aa, Artificial Sequence
  Synthetic Polypeptide
EVQLLESGGGLVQPGGSLRLSCAASGFTFSHYIMMWVRQAPGKGLEWVSGIYSSGGITVYADSVKGRFTISRDNSKNTLYLQMNSLRAEDTAVYYCAYRRIGVPRRDEFDIWGQGTMVTVSSASTKGPSVFPLAPSSKSTSGGTAALGCLVKDYFPEPVTVSWNSGALTSGVHTFPAVLQSSGLYSLSSVVTVPSSSLGTQTYICNVNHKPSNTKVDKRVEPKSCDKTHTCPPCPAPELLGGPSVFLFPPKPKDTLMISRTPEVTCVVVDVSHEDPEVKFNWYVDGVEVHNAKTKPREEQYNSTYRVVSVLTVLHQDWLNGKEYKCKVSNKALPAPIEKTISKAKGQPREPQVYTLPPSREEMTKNQVSLTCLVKGFYPSDIAVEWESNGQPENNYKTTPPVLDSDGSFFLYSKLTVDKSRWQQGNVFSCSVMHEALHNHYTQKSLSLSPGKSGGGSDIQMTQSPLSLPVTPGEPASISCRSSQSLLHSNGYNYLDWYLQKPGQSPQLLIYLGSNRASGVPDRFSGSGSGTDFTLKISRVEAEDVGVYYCMQALQTPWTFGQGTKVEIKRTGGGGSGGGGSGGGGSGGGGSEVQLLESGGGLVQPGGSLRLSCAASGFTFSPYIMHWVRQAPGKGLEWVSRIYPSGGATVYADSVKGRFTISRDNSKNTLYLQMNSLRAEDTAVYYCTRQRYRGPKYYYYMDVWGKGTTVTVSS

SEQ ID NO: 89 - protein, 713 aa, Artificial Sequence
  Synthetic Polypeptide
EVQLLESGGGLVQPGGSLRLSCAASGFTFSHYIMMWVRQAPGKGLEWVSGIYSSGGITVYADSVKGRFTISRDNSKNTLYLQMNSLRAEDTAVYYCAYRRIGVPRRDEFDIWGQGTMVTVSSASTKGPSVFPLAPSSKSTSGGTAALGCLVKDYFPEPVTVSWNSGALTSGVHTFPAVLQSSGLYSLSSVVTVPSSSLGTQTYICNVNHKPSNTKVDKRVEPKSCDKTHTCPPCPAPELLGGPSVFLFPPKPKDTLMISRTPEVTCVVVDVSHEDPEVKFNWYVDGVEVHNAKTKPREEQYNSTYRVVSVLTVLHQDWLNGKEYKCKVSNKALPAPIEKTISKAKGQPREPQVYTLPPSREEMTKNQVSLTCLVKGFYPSDIAVEWESNGQPENNYKTTPPVLDSDGSFFLYSKLTVDKSRWQQGNVFSCSVMHEALHNHYTQKSLSLSPGKSGGGSEVQLLESGGGLVQPGGSLRLSCAASGFTFSMYIMHWVRQAPGKGLEWVSSIYPSGGMTKYADSVKGRFTISRDNSKNTLYLQMNSLRAEDTAVYYCTRQRYRGPKYYYYMDVWGKGTTVTVSSGGGGSGGGGSGGGGSGGGGSDIQMTQSPLSLPVTPGEPASISCRSSQSLLHSNGYNYLDWYLQKPGQSPQLLIYLGSNRASGVPDRFSGSGSGTDFTLKISRVEAEDVGVYYCMQALQTPWTFGQGTKVEIKR

SEQ ID NO: 90 - protein, 714 aa, Artificial Sequence
  Synthetic Polypeptide
EVQLLESGGGLVQPGGSLRLSCAASGFTFSHYIMMWVRQAPGKGLEWVSGIYSSGGITVYADSVKGRFTISRDNSKNTLYLQMNSLRAEDTAVYYCAYRRIGVPRRDEFDIWGQGTMVTVSSASTKGPSVFPLAPSSKSTSGGTAALGCLVKDYFPEPVTVSWNSGALTSGVHTFPAVLQSSGLYSLSSVVTVPSSSLGTQTYICNVNHKPSNTKVDKRVEPKSCDKTHTCPPCPAPELLGGPSVFLFPPKPKDTLMISRTPEVTCVVVDVSHEDPEVKFNWYVDGVEVHNAKTKPREEQYNSTYRVVSVLTVLHQDWLNGKEYKCKVSNKALPAPIEKTISKAKGQPREPQVYTLPPSREEMTKNQVSLTCLVKGFYPSDIAVEWESNGQPENNYKTTPPVLDSDGSFFLYSKLTVDKSRWQQGNVFSCSVMHEALHNHYTQKSLSLSPGKSGGGSDIQMTQSPLSLPVTPGEPASISCRSSQSLLHSNGYNYLDWYLQKPGQSPQLLIYLGSNRASGVPDRFSGSGSGTDFTLKISRVEAEDVGVYYCMQALQTPWTFGQGTKVEIKRTGGGGSGGGGSGGGGSGGGGSEVQLLESGGGLVQPGGSLRLSCAASGFTFSMYIMHWVRQAPGKGLEWVSSIYPSGGMTKYADSVKGRFTISRDNSKNTLYLQMNSLRAEDTAVYYCTRQRYRGPKYYYYMDVWGKGTTVTVSS

SEQ ID NO: 91 - protein, 713 aa, Artificial Sequence
  Synthetic Polypeptide
EVQLLESGGGLVQPGGSLRLSCAASGFTFSHYIMMWVRQAPGKGLEWVSGIYSSGGITVYADSVKGRFTISRDNSKNTLYLQMNSLRAEDTAVYYCAYRRIGVPRRDEFDIWGQGTMVTVSSASTKGPSVFPLAPSSKSTSGGTAALGCLVKDYFPEPVTVSWNSGALTSGVHTFPAVLQSSGLYSLSSVVTVPSSSLGTQTYICNVNHKPSNTKVDKRVEPKSCDKTHTCPPCPAPELLGGPSVFLFPPKPKDTLMISRTPEVTCVVVDVSHEDPEVKFNWYVDGVEVHNAKTKPREEQYNSTYRVVSVLTVLHQDWLNGKEYKCKVSNKALPAPIEKTISKAKGQPREPQVYTLPPSREEMTKNQVSLTCLVKGFYPSDIAVEWESNGQPENNYKTTPPVLDSDGSFFLYSKLTVDKSRWQQGNVFSCSVMHEALHNHYTQKSLSLSPGKSGGGSEVQLLESGGGLVQPGGSLRLSCAASGFTFSWYSMHWVRQAPGKGLEWVSVIYPSGGKTRYADSVKGRFTISRDNSKNTLYLQMNSLRAEDTAVYYCTRQRYRGPKYYYYMDVWGKGTTVTVSSGGGGSGGGGSGGGGSGGGGSDIQMTQSPLSLPVTPGEPASISCRSSQSLLHSNGYNYLDWYLQKPGQSPQLLIYLGSNRASGVPDRFSGSGSGTDFTLKISRVEAEDVGVYYCMQALQTPWTFGQGTKVEIKR

SEQ ID NO: 92 - protein, 714 aa, Artificial Sequence
  Synthetic Polypeptide
EVQLLESGGGLVQPGGSLRLSCAASGFTFSHYIMMWVRQAPGKGLEWVSGIYSSGGITVYADSVKGRFTISRDNSKNTLYLQMNSLRAEDTAVYYCAYRRIGVPRRDEFDIWGQGTMVTVSSASTKGPSVFPLAPSSKSTSGGTAALGCLVKDYFPEPVTVSWNSGALTSGVHTFPAVLQSSGLYSLSSVVTVPSSSLGTQTYICNVNHKPSNTKVDKRVEPKSCDKTHTCPPCPAPELLGGPSVFLFPPKPKDTLMISRTPEVTCVVVDVSHEDPEVKFNWYVDGVEVHNAKTKPREEQYNSTYRVVSVLTVLHQDWLNGKEYKCKVSNKALPAPIEKTISKAKGQPREPQVYTLPPSREEMTKNQVSLTCLVKGFYPSDIAVEWESNGQPENNYKTTPPVLDSDGSFFLYSKLTVDKSRWQQGNVFSCSVMHEALHNHYTQKSLSLSPGKSGGGSDIQMTQSPLSLPVTPGEPASISCRSSQSLLHSNGYNYLDWYLQKPGQSPQLLIYLGSNRASGVPDRFSGSGSGTDFTLKISRVEAEDVGVYYCMQALQTPWTFGQGTKVEIKRTGGGGSGGGGSGGGGSGGGGSEVQLLESGGGLVQPGGSLRLSCAASGFTFSWYSMHWVRQAPGKGLEWVSVIYPSGGKTRYADSVKGRFTISRDNSKNTLYLQMNSLRAEDTAVYYCTRQRYRGPKYYYYMDVWGKGTTVTVSS

SEQ ID NO: 93 - protein, 713 aa, Artificial Sequence
  Synthetic Polypeptide
EVQLLESGGGLVQPGGSLRLSCAASGFTFSHYIMMWVRQAPGKGLEWVSGIYSSGGITVYADSVKGRFTISRDNSKNTLYLQMNSLRAEDTAVYYCAYRRIGVPRRDEFDIWGQGTMVTVSSASTKGPSVFPLAPSSKSTSGGTAALGCLVKDYFPEPVTVSWNSGALTSGVHTFPAVLQSSGLYSLSSVVTVPSSSLGTQTYICNVNHKPSNTKVDKRVEPKSCDKTHTCPPCPAPELLGGPSVFLFPPKPKDTLMISRTPEVTCVVVDVSHEDPEVKFNWYVDGVEVHNAKTKPREEQYNSTYRVVSVLTVLHQDWLNGKEYKCKVSNKALPAPIEKTISKAKGQPREPQVYTLPPSREEMTKNQVSLTCLVKGFYPSDIAVEWESNGQPENNYKTTPPVLDSDGSFFLYSKLTVDKSRWQQGNVFSCSVMHEALHNHYTQKSLSLSPGKSGGGSEVQLLESGGGLVQPGGSLRLSCAASGFTFSMYVMHWVRQAPGKGLEWVSSIYPSGGLTKYADSVKGRFTISRDNSKNTLYLQMNSLRAEDTAVYYCTRQRYRGPKYYYYMDVWGKGTTVTVSSGGGGSGGGGSGGGGSGGGGSDIQMTQSPLSLPVTPGEPASISCRSSQSLLHSNGYNYLDWYLQKPGQSPQLLIYLGSNRASGVPDRFSGSGSGTDFTLKISRVEAEDVGVYYCMQALQTPWTFGQGTKVEIKR

SEQ ID NO: 94 - protein, 714 aa, Artificial Sequence
  Synthetic Polypeptide
EVQLLESGGGLVQPGGSLRLSCAASGFTFSHYIMMWVRQAPGKGLEWVSGIYSSGGITVYADSVKGRFTISRDNSKNTLYLQMNSLRAEDTAVYYCAYRRIGVPRRDEFDIWGQGTMVTVSSASTKGPSVFPLAPSSKSTSGGTAALGCLVKDYFPEPVTVSWNSGALTSGVHTFPAVLQSSGLYSLSSVVTVPSSSLGTQTYICNVNHKPSNTKVDKRVEPKSCDKTHTCPPCPAPELLGGPSVFLFPPKPKDTLMISRTPEVTCVVVDVSHEDPEVKFNWYVDGVEVHNAKTKPREEQYNSTYRVVSVLTVLHQDWLNGKEYKCKVSNKALPAPIEKTISKAKGQPREPQVYTLPPSREEMTKNQVSLTCLVKGFYPSDIAVEWESNGQPENNYKTTPPVLDSDGSFFLYSKLTVDKSRWQQGNVFSCSVMHEALHNHYTQKSLSLSPGKSGGGSDIQMTQSPLSLPVTPGEPASISCRSSQSLLHSNGYNYLDWYLQKPGQSPQLLIYLGSNRASGVPDRFSGSGSGTDFTLKISRVEAEDVGVYYCMQALQTPWTFGQGTKVEIKRTGGGGSGGGGSGGGGSGGGGSEVQLLESGGGLVQPGGSLRLSCAASGFTFSMYVMHWVRQAPGKGLEWVSSIYPSGGLTKYADSVKGRFTISRDNSKNTLYLQMNSLRAEDTAVYYCTRQRYRGPKYYYYMDVWGKGTTVTVSS

SEQ ID NO: 95 - protein, 713 aa, Artificial Sequence
  Synthetic Polypeptide
EVQLLESGGGLVQPGGSLRLSCAASGFTFSHYIMMWVRQAPGKGLEWVSGIYSSGGITVYADSVKGRFTISRDNSKNTLYLQMNSLRAEDTAVYYCAYRRIGVPRRDEFDIWGQGTMVTVSSASTKGPSVFPLAPSSKSTSGGTAALGCLVKDYFPEPVTVSWNSGALTSGVHTFPAVLQSSGLYSLSSVVTVPSSSLGTQTYICNVNHKPSNTKVDKRVEPKSCDKTHTCPPCPAPELLGGPSVFLFPPKPKDTLMISRTPEVTCVVVDVSHEDPEVKFNWYVDGVEVHNAKTKPREEQYNSTYRVVSVLTVLHQDWLNGKEYKCKVSNKALPAPIEKTISKAKGQPREPQVYTLPPSREEMTKNQVSLTCLVKGFYPSDIAVEWESNGQPENNYKTTPPVLDSDGSFFLYSKLTVDKSRWQQGNVFSCSVMHEALHNHYTQKSLSLSPGKSGGGSEVQLLESGGGLVQPGGSLRLSCAASGFTFSWYTMHWVRQAPGKGLEWVSSIYPSGGFTRYADSVKGRFTISRDNSKNTLYLQMNSLRAEDTAVYYCTRQRYRGPKYYYYMDVWGKGTTVTVSSGGGGSGGGGSGGGGSGGGGSDIQMTQSPLSLPVTPGEPASISCRSSQSLLHSNGYNYLDWYLQKPGQSPQLLIYLGSNRASGVPDRFSGSGSGTDFTLKISRVEAEDVGVYYCMQALQTPWTFGQGTKVEIKR

SEQ ID NO: 96 - protein, 714 aa, Artificial Sequence
  Synthetic Polypeptide
EVQLLESGGGLVQPGGSLRLSCAASGFTFSHYIMMWVRQAPGKGLEWVSGIYSSGGITVYADSVKGRFTISRDNSKNTLYLQMNSLRAEDTAVYYCAYRRIGVPRRDEFDIWGQGTMVTVSSASTKGPSVFPLAPSSKSTSGGTAALGCLVKDYFPEPVTVSWNSGALTSGVHTFPAVLQSSGLYSLSSVVTVPSSSLGTQTYICNVNHKPSNTKVDKRVEPKSCDKTHTCPPCPAPELLGGPSVFLFPPKPKDTLMISRTPEVTCVVVDVSHEDPEVKFNWYVDGVEVHNAKTKPREEQYNSTYRVVSVLTVLHQDWLNGKEYKCKVSNKALPAPIEKTISKAKGQPREPQVYTLPPSREEMTKNQVSLTCLVKGFYPSDIAVEWESNGQPENNYKTTPPVLDSDGSFFLYSKLTVDKSRWQQGNVFSCSVMHEALHNHYTQKSLSLSPGKSGGGSDIQMTQSPLSLPVTPGEPASISCRSSQSLLHSNGYNYLDWYLQKPGQSPQLLIYLGSNRASGVPDRFSGSGSGTDFTLKISRVEAEDVGVYYCMQALQTPWTFGQGTKVEIKRTGGGGSGGGGSGGGGSGGGGSEVQLLESGGGLVQPGGSLRLSCAASGFTFSWYTMHWVRQAPGKGLEWVSSIYPSGGFTRYADSVKGRFTISRDNSKNTLYLQMNSLRAEDTAVYYCTRQRYRGPKYYYYMDVWGKGTTVTVSS

SEQ ID NO: 97 - protein, 713 aa, Artificial Sequence
  Synthetic Polypeptide
EVQLLESGGGLVQPGGSLRLSCAASGFTFSHYIMMWVRQAPGKGLEWVSGIYSSGGITVYADSVKGRFTISRDNSKNTLYLQMNSLRAEDTAVYYCAYRRIGVPRRDEFDIWGQGTMVTVSSASTKGPSVFPLAPSSKSTSGGTAALGCLVKDYFPEPVTVSWNSGALTSGVHTFPAVLQSSGLYSLSSVVTVPSSSLGTQTYICNVNHKPSNTKVDKRVEPKSCDKTHTCPPCPAPELLGGPSVFLFPPKPKDTLMISRTPEVTCVVVDVSHEDPEVKFNWYVDGVEVHNAKTKPREEQYNSTYRVVSVLTVLHQDWLNGKEYKCKVSNKALPAPIEKTISKAKGQPREPQVYTLPPSREEMTKNQVSLTCLVKGFYPSDIAVEWESNGQPENNYKTTPPVLDSDGSFFLYSKLTVDKSRWQQGNVFSCSVMHEALHNHYTQKSLSLSPGKSGGGSEVQLLESGGGLVQPGGSLRLSCAASGFTFSHYVMHWVRQAPGKGLEWVSSIYPSGGLTKYADSVKGRFTISRDNSKNTLYLQMNSLRAEDTAVYYCTRQRYRGPKYYYYMDVWGKGTTVTVSSGGGGSGGGGSGGGGSGGGGSDIQMTQSPLSLPVTPGEPASISCRSSQSLLHSNGYNYLDWYLQKPGQSPQLLIYLGSNRASGVPDRFSGSGSGTDFTLKISRVEAEDVGVYYCMQALQTPWTFGQGTKVEIKR

SEQ ID NO: 98 - protein, 714 aa, Artificial Sequence
  Synthetic Polypeptide
EVQLLESGGGLVQPGGSLRLSCAASGFTFSHYIMMWVRQAPGKGLEWVSGIYSSGGITVYADSVKGRFTISRDNSKNTLYLQMNSLRAEDTAVYYCAYRRIGVPRRDEFDIWGQGTMVTVSSASTKGPSVFPLAPSSKSTSGGTAALGCLVKDYFPEPVTVSWNSGALTSGVHTFPAVLQSSGLYSLSSVVTVPSSSLGTQTYICNVNHKPSNTKVDKRVEPKSCDKTHTCPPCPAPELLGGPSVFLFPPKPKDTLMISRTPEVTCVVVDVSHEDPEVKFNWYVDGVEVHNAKTKPREEQYNSTYRVVSVLTVLHQDWLNGKEYKCKVSNKALPAPIEKTISKAKGQPREPQVYTLPPSREEMTKNQVSLTCLVKGFYPSDIAVEWESNGQPENNYKTTPPVLDSDGSFFLYSKLTVDKSRWQQGNVFSCSVMHEALHNHYTQKSLSLSPGKSGGGSDIQMTQSPLSLPVTPGEPASISCRSSQSLLHSNGYNYLDWYLQKPGQSPQLLIYLGSNRASGVPDRFSGSGSGTDFTLKISRVEAEDVGVYYCMQALQTPWTFGQGTKVEIKRTGGGGSGGGGSGGGGSGGGGSEVQLLESGGGLVQPGGSLRLSCAASGFTFSHYVMHWVRQAPGKGLEWVSSIYPSGGLTKYADSVKGRFTISRDNSKNTLYLQMNSLRAEDTAVYYCTRQRYRGPKYYYYMDVWGKGTTVTVSS

SEQ ID NO: 99 - protein, 713 aa, Artificial Sequence
  Synthetic Polypeptide
EVQLLESGGGLVQPGGSLRLSCAASGFTFSHYIMMWVRQAPGKGLEWVSGIYSSGGITVYADSVKGRFTISRDNSKNTLYLQMNSLRAEDTAVYYCAYRRIGVPRRDEFDIWGQGTMVTVSSASTKGPSVFPLAPSSKSTSGGTAALGCLVKDYFPEPVTVSWNSGALTSGVHTFPAVLQSSGLYSLSSVVTVPSSSLGTQTYICNVNHKPSNTKVDKRVEPKSCDKTHTCPPCPAPELLGGPSVFLFPPKPKDTLMISRTPEVTCVVVDVSHEDPEVKFNWYVDGVEVHNAKTKPREEQYNSTYRVVSVLTVLHQDWLNGKEYKCKVSNKALPAPIEKTISKAKGQPREPQVYTLPPSREEMTKNQVSLTCLVKGFYPSDIAVEWESNGQPENNYKTTPPVLDSDGSFFLYSKLTVDKSRWQQGNVFSCSVMHEALHNHYTQKSLSLSPGKSGGGSEVQLLESGGGLVQPGGSLRLSCAASGFTFSWYVMQWVRQAPGKGLEWVSSIYPSGGMTKYADSVKGRFTISRDNSKNTLYLQMNSLRAEDTAVYYCTRQRYRGPKYYYYMDVWGKGTTVTVSSGGGGSGGGGSGGGGSGGGGSDIQMTQSPLSLPVTPGEPASISCRSSQSLLHSNGYNYLDWYLQKPGQSPQLLIYLGSNRASGVPDRFSGSGSGTDFTLKISRVEAEDVGVYYCMQALQTPWTFGQGTKVEIKR

SEQ ID NO: 100 - protein, 714 aa, Artificial Sequence
  Synthetic Polypeptide
EVQLLESGGGLVQPGGSLRLSCAASGFTFSHYIMMWVRQAPGKGLEWVSGIYSSGGITVYADSVKGRFTISRDNSKNTLYLQMNSLRAEDTAVYYCAYRRIGVPRRDEFDIWGQGTMVTVSSASTKGPSVFPLAPSSKSTSGGTAALGCLVKDYFPEPVTVSWNSGALTSGVHTFPAVLQSSGLYSLSSVVTVPSSSLGTQTYICNVNHKPSNTKVDKRVEPKSCDKTHTCPPCPAPELLGGPSVFLFPPKPKDTLMISRTPEVTCVVVDVSHEDPEVKFNWYVDGVEVHNAKTKPREEQYNSTYRVVSVLTVLHQDWLNGKEYKCKVSNKALPAPIEKTISKAKGQPREPQVYTLPPSREEMTKNQVSLTCLVKGFYPSDIAVEWESNGQPENNYKTTPPVLDSDGSFFLYSKLTVDKSRWQQGNVFSCSVMHEALHNHYTQKSLSLSPGKSGGGSDIQMTQSPLSLPVTPGEPASISCRSSQSLLHSNGYNYLDWYLQKPGQSPQLLIYLGSNRASGVPDRFSGSGSGTDFTLKISRVEAEDVGVYYCMQALQTPWTFGQGTKVEIKRTGGGGSGGGGSGGGGSGGGGSEVQLLESGGGLVQPGGSLRLSCAASGFTFSWYVMQWVRQAPGKGLEWVSSIYPSGGMTKYADSVKGRFTISRDNSKNTLYLQMNSLRAEDTAVYYCTRQRYRGPKYYYYMDVWGKGTTVTVSS

SEQ ID NO: 101 - protein, 713 aa, Artificial Sequence
  Synthetic Polypeptide
EVQLLESGGGLVQPGGSLRLSCAASGFTFSHYIMMWVRQAPGKGLEWVSGIYSSGGITVYADSVKGRFTISRDNSKNTLYLQMNSLRAEDTAVYYCAYRRIGVPRRDEFDIWGQGTMVTVSSASTKGPSVFPLAPSSKSTSGGTAALGCLVKDYFPEPVTVSWNSGALTSGVHTFPAVLQSSGLYSLSSVVTVPSSSLGTQTYICNVNHKPSNTKVDKRVEPKSCDKTHTCPPCPAPELLGGPSVFLFPPKPKDTLMISRTPEVTCVVVDVSHEDPEVKFNWYVDGVEVHNAKTKPREEQYNSTYRVVSVLTVLHQDWLNGKEYKCKVSNKALPAPIEKTISKAKGQPREPQVYTLPPSREEMTKNQVSLTCLVKGFYPSDIAVEWESNGQPENNYKTTPPVLDSDGSFFLYSKLTVDKSRWQQGNVFSCSVMHEALHNHYTQKSLSLSPGKSGGGSEVQLLESGGGLVQPGGSLRLSCAASGFTFSQYVMHWVRQAPGKGLEWVSSIWPSGGFTKYADSVKGRFTISRDNSKNTLYLQMNSLRAEDTAVYYCTRQRYRGPKYYYYMDVWGKGTTVTVSSGGGGSGGGGSGGGGSGGGGSDIQMTQSPLSLPVTPGEPASISCRSSQSLLHSNGYNYLDWYLQKPGQSPQLLIYLGSNRASGVPDRFSGSGSGTDFTLKISRVEAEDVGVYYCMQALQTPWTFGQGTKVEIKR

SEQ ID NO: 102 - protein, 714 aa, Artificial Sequence
  Synthetic Polypeptide
EVQLLESGGGLVQPGGSLRLSCAASGFTFSHYIMMWVRQAPGKGLEWVSGIYSSGGITVYADSVKGRFTISRDNSKNTLYLQMNSLRAEDTAVYYCAYRRIGVPRRDEFDIWGQGTMVTVSSASTKGPSVFPLAPSSKSTSGGTAALGCLVKDYFPEPVTVSWNSGALTSGVHTFPAVLQSSGLYSLSSVVTVPSSSLGTQTYICNVNHKPSNTKVDKRVEPKSCDKTHTCPPCPAPELLGGPSVFLFPPKPKDTLMISRTPEVTCVVVDVSHEDPEVKFNWYVDGVEVHNAKTKPREEQYNSTYRVVSVLTVLHQDWLNGKEYKCKVSNKALPAPIEKTISKAKGQPREPQVYTLPPSREEMTKNQVSLTCLVKGFYPSDIAVEWESNGQPENNYKTTPPVLDSDGSFFLYSKLTVDKSRWQQGNVFSCSVMHEALHNHYTQKSLSLSPGKSGGGSDIQMTQSPLSLPVTPGEPASISCRSSQSLLHSNGYNYLDWYLQKPGQSPQLLIYLGSNRASGVPDRFSGSGSGTDFTLKISRVEAEDVGVYYCMQALQTPWTFGQGTKVEIKRTGGGGSGGGGSGGGGSGGGGSEVQLLESGGGLVQPGGSLRLSCAASGFTFSQYVMHWVRQAPGKGLEWVSSIWPSGGFTKYADSVKGRFTISRDNSKNTLYLQMNSLRAEDTAVYYCTRQRYRGPKYYYYMDVWGKGTTVTVSS

SEQ ID NO: 103 - protein, 713 aa, Artificial Sequence
  Synthetic Polypeptide
EVQLLESGGGLVQPGGSLRLSCAASGFTFSHYIMMWVRQAPGKGLEWVSGIYSSGGITVYADSVKGRFTISRDNSKNTLYLQMNSLRAEDTAVYYCAYRRIGVPRRDEFDIWGQGTMVTVSSASTKGPSVFPLAPSSKSTSGGTAALGCLVKDYFPEPVTVSWNSGALTSGVHTFPAVLQSSGLYSLSSVVTVPSSSLGTQTYICNVNHKPSNTKVDKRVEPKSCDKTHTCPPCPAPELLGGPSVFLFPPKPKDTLMISRTPEVTCVVVDVSHEDPEVKFNWYVDGVEVHNAKTKPREEQYNSTYRVVSVLTVLHQDWLNGKEYKCKVSNKALPAPIEKTISKAKGQPREPQVYTLPPSREEMTKNQVSLTCLVKGFYPSDIAVEWESNGQPENNYKTTPPVLDSDGSFFLYSKLTVDKSRWQQGNVFSCSVMHEALHNHYTQKSLSLSPGKSGGGSEVQLLESGGGLVQPGGSLRLSCAASGFTFSWYIMQWVRQAPGKGLEWVSSIYPSGGRTKYADSVKGRFTISRDNSKNTLYLQMNSLRAEDTAVYYCTRQRYRGPKYYYYMDVWGKGTTVTVSSGGGGSGGGGSGGGGSGGGGSDIQMTQSPLSLPVTPGEPASISCRSSQSLLHSNGYNYLDWYLQKPGQSPQLLIYLGSNRASGVPDRFSGSGSGTDFTLKISRVEAEDVGVYYCMQALQTPWTFGQGTKVEIKR

SEQ ID NO: 104 - protein, 714 aa, Artificial Sequence
  Synthetic Polypeptide
EVQLLESGGGLVQPGGSLRLSCAASGFTFSHYIMMWVRQAPGKGLEWVSGIYSSGGITVYADSVKGRFTISRDNSKNTLYLQMNSLRAEDTAVYYCAYRRIGVPRRDEFDIWGQGTMVTVSSASTKGPSVFPLAPSSKSTSGGTAALGCLVKDYFPEPVTVSWNSGALTSGVHTFPAVLQSSGLYSLSSVVTVPSSSLGTQTYICNVNHKPSNTKVDKRVEPKSCDKTHTCPPCPAPELLGGPSVFLFPPKPKDTLMISRTPEVTCVVVDVSHEDPEVKFNWYVDGVEVHNAKTKPREEQYNSTYRVVSVLTVLHQDWLNGKEYKCKVSNKALPAPIEKTISKAKGQPREPQVYTLPPSREEMTKNQVSLTCLVKGFYPSDIAVEWESNGQPENNYKTTPPVLDSDGSFFLYSKLTVDKSRWQQGNVFSCSVMHEALHNHYTQKSLSLSPGKSGGGSDIQMTQSPLSLPVTPGEPASISCRSSQSLLHSNGYNYLDWYLQKPGQSPQLLIYLGSNRASGVPDRFSGSGSGTDFTLKISRVEAEDVGVYYCMQALQTPWTFGQGTKVEIKRTGGGGSGGGGSGGGGSGGGGSEVQLLESGGGLVQPGGSLRLSCAASGFTFSWYIMQWVRQAPGKGLEWVSSIYPSGGRTKYADSVKGRFTISRDNSKNTLYLQMNSLRAEDTAVYYCTRQRYRGPKYYYYMDVWGKGTTVTVSS

SEQ ID NO: 105 - protein, 713 aa, Artificial Sequence
  Synthetic Polypeptide
EVQLLESGGGLVQPGGSLRLSCAASGFTFSHYIMMWVRQAPGKGLEWVSGIYSSGGITVYADSVKGRFTISRDNSKNTLYLQMNSLRAEDTAVYYCAYRRIGVPRRDEFDIWGQGTMVTVSSASTKGPSVFPLAPSSKSTSGGTAALGCLVKDYFPEPVTVSWNSGALTSGVHTFPAVLQSSGLYSLSSVVTVPSSSLGTQTYICNVNHKPSNTKVDKRVEPKSCDKTHTCPPCPAPELLGGPSVFLFPPKPKDTLMISRTPEVTCVVVDVSHEDPEVKFNWYVDGVEVHNAKTKPREEQYNSTYRVVSVLTVLHQDWLNGKEYKCKVSNKALPAPIEKTISKAKGQPREPQVYTLPPSREEMTKNQVSLTCLVKGFYPSDIAVEWESNGQPENNYKTTPPVLDSDGSFFLYSKLTVDKSRWQQGNVFSCSVMHEALHNHYTQKSLSLSPGKSGGGSEVQLLESGGGLVQPGGSLRLSCAASGFTFSWYNMAWVRQAPGKGLEWVSRIYPSGGMTQYADSVKGRFTISRDNSKNTLYLQMNSLRAEDTAVYYCTRQRYRGPKYYYYMDVWGKGTTVTVSSGGGGSGGGGSGGGGSGGGGSDIQMTQSPLSLPVTPGEPASISCRSSQSLLHSNGYNYLDWYLQKPGQSPQLLIYLGSNRASGVPDRFSGSGSGTDFTLKISRVEAEDVGVYYCMQALQTPWTFGQGTKVEIKR

SEQ ID NO: 106 - protein, 714 aa, Artificial Sequence
  Synthetic Polypeptide
EVQLLESGGGLVQPGGSLRLSCAASGFTFSHYIMMWVRQAPGKGLEWVSGIYSSGGITVYADSVKGRFTISRDNSKNTLYLQMNSLRAEDTAVYYCAYRRIGVPRRDEFDIWGQGTMVTVSSASTKGPSVFPLAPSSKSTSGGTAALGCLVKDYFPEPVTVSWNSGALTSGVHTFPAVLQSSGLYSLSSVVTVPSSSLGTQTYICNVNHKPSNTKVDKRVEPKSCDKTHTCPPCPAPELLGGPSVFLFPPKPKDTLMISRTPEVTCVVVDVSHEDPEVKFNWYVDGVEVHNAKTKPREEQYNSTYRVVSVLTVLHQDWLNGKEYKCKVSNKALPAPIEKTISKAKGQPREPQVYTLPPSREEMTKNQVSLTCLVKGFYPSDIAVEWESNGQPENNYKTTPPVLDSDGSFFLYSKLTVDKSRWQQGNVFSCSVMHEALHNHYTQKSLSLSPGKSGGGSDIQMTQSPLSLPVTPGEPASISCRSSQSLLHSNGYNYLDWYLQKPGQSPQLLIYLGSNRASGVPDRFSGSGSGTDFTLKISRVEAEDVGVYYCMQALQTPWTFGQGTKVEIKRTGGGGSGGGGSGGGGSGGGGSEVQLLESGGGLVQPGGSLRLSCAASGFTFSWYNMAWVRQAPGKGLEWVSRIYPSGGMTQYADSVKGRFTISRDNSKNTLYLQMNSLRAEDTAVYYCTRQRYRGPKYYYYMDVWGKGTTVTVSS

SEQ ID NO: 107 - protein, 713 aa, Artificial Sequence
  Synthetic Polypeptide
EVQLLESGGGLVQPGGSLRLSCAASGFTFSHYIMMWVRQAPGKGLEWVSGIYSSGGITVYADSVKGRFTISRDNSKNTLYLQMNSLRAEDTAVYYCAYRRIGVPRRDEFDIWGQGTMVTVSSASTKGPSVFPLAPSSKSTSGGTAALGCLVKDYFPEPVTVSWNSGALTSGVHTFPAVLQSSGLYSLSSVVTVPSSSLGTQTYICNVNHKPSNTKVDKRVEPKSCDKTHTCPPCPAPELLGGPSVFLFPPKPKDTLMISRTPEVTCVVVDVSHEDPEVKFNWYVDGVEVHNAKTKPREEQYNSTYRVVSVLTVLHQDWLNGKEYKCKVSNKALPAPIEKTISKAKGQPREPQVYTLPPSREEMTKNQVSLTCLVKGFYPSDIAVEWESNGQPENNYKTTPPVLDSDGSFFLYSKLTVDKSRWQQGNVFSCSVMHEALHNHYTQKSLSLSPGKSGGGSEVQLLESGGGLVQPGGSLRLSCAASGFTFSWYVMHWVRQAPGKGLEWVSSIYPSGGKTSYADSVKGRFTISRDNSKNTLYLQMNSLRAEDTAVYYCTRQRYRGPKYYYYMDVWGKGTTVTVSSGGGGSGGGGSGGGGSGGGGSDIQMTQSPLSLPVTPGEPASISCRSSQSLLHSNGYNYLDWYLQKPGQSPQLLIYLGSNRASGVPDRFSGSGSGTDFTLKISRVEAEDVGVYYCMQALQTPWTFGQGTKVEIKR

SEQ ID NO: 108 - protein, 714 aa, Artificial Sequence
  Synthetic Polypeptide
EVQLLESGGGLVQPGGSLRLSCAASGFTFSHYIMMWVRQAPGKGLEWVSGIYSSGGITVYADSVKGRFTISRDNSKNTLYLQMNSLRAEDTAVYYCAYRRIGVPRRDEFDIWGQGTMVTVSSASTKGPSVFPLAPSSKSTSGGTAALGCLVKDYFPEPVTVSWNSGALTSGVHTFPAVLQSSGLYSLSSVVTVPSSSLGTQTYICNVNHKPSNTKVDKRVEPKSCDKTHTCPPCPAPELLGGPSVFLFPPKPKDTLMISRTPEVTCVVVDVSHEDPEVKFNWYVDGVEVHNAKTKPREEQYNSTYRVVSVLTVLHQDWLNGKEYKCKVSNKALPAPIEKTISKAKGQPREPQVYTLPPSREEMTKNQVSLTCLVKGFYPSDIAVEWESNGQPENNYKTTPPVLDSDGSFFLYSKLTVDKSRWQQGNVFSCSVMHEALHNHYTQKSLSLSPGKSGGGSDIQMTQSPLSLPVTPGEPASISCRSSQSLLHSNGYNYLDWYLQKPGQSPQLLIYLGSNRASGVPDRFSGSGSGTDFTLKISRVEAEDVGVYYCMQALQTPWTFGQGTKVEIKRTGGGGSGGGGSGGGGSGGGGSEVQLLESGGGLVQPGGSLRLSCAASGFTFSWYVMHWVRQAPGKGLEWVSSIYPSGGKTSYADSVKGRFTISRDNSKNTLYLQMNSLRAEDTAVYYCTRQRYRGPKYYYYMDVWGKGTTVTVSS

SEQ ID NO: 109 - protein, 713 aa, Artificial Sequence
  Synthetic Polypeptide
EVQLLESGGGLVQPGGSLRLSCAASGFTFSHYIMMWVRQAPGKGLEWVSGIYSSGGITVYADSVKGRFTISRDNSKNTLYLQMNSLRAEDTAVYYCAYRRIGVPRRDEFDIWGQGTMVTVSSASTKGPSVFPLAPSSKSTSGGTAALGCLVKDYFPEPVTVSWNSGALTSGVHTFPAVLQSSGLYSLSSVVTVPSSSLGTQTYICNVNHKPSNTKVDKRVEPKSCDKTHTCPPCPAPELLGGPSVFLFPPKPKDTLMISRTPEVTCVVVDVSHEDPEVKFNWYVDGVEVHNAKTKPREEQYNSTYRVVSVLTVLHQDWLNGKEYKCKVSNKALPAPIEKTISKAKGQPREPQVYTLPPSREEMTKNQVSLTCLVKGFYPSDIAVEWESNGQPENNYKTTPPVLDSDGSFFLYSKLTVDKSRWQQGNVFSCSVMHEALHNHYTQKSLSLSPGKSGGGSEVQLLESGGGLVQPGGSLRLSCAASGFTFSQYVMSWVRQAPGKGLEWVSRIYPSGGVTKYADSVKGRFTISRDNSKNTLYLQMNSLRAEDTAVYYCTRQRYRGPKYYYYMDVWGKGTTVTVSSGGGGSGGGGSGGGGSGGGGSDIQMTQSPLSLPVTPGEPASISCRSSQSLLHSNGYNYLDWYLQKPGQSPQLLIYLGSNRASGVPDRFSGSGSGTDFTLKISRVEAEDVGVYYCMQALQTPWTFGQGTKVEIKR

SEQ ID NO: 110 - protein, 714 aa, Artificial Sequence
  Synthetic Polypeptide
EVQLLESGGGLVQPGGSLRLSCAASGFTFSHYIMMWVRQAPGKGLEWVSGIYSSGGITVYADSVKGRFTISRDNSKNTLYLQMNSLRAEDTAVYYCAYRRIGVPRRDEFDIWGQGTMVTVSSASTKGPSVFPLAPSSKSTSGGTAALGCLVKDYFPEPVTVSWNSGALTSGVHTFPAVLQSSGLYSLSSVVTVPSSSLGTQTYICNVNHKPSNTKVDKRVEPKSCDKTHTCPPCPAPELLGGPSVFLFPPKPKDTLMISRTPEVTCVVVDVSHEDPEVKFNWYVDGVEVHNAKTKPREEQYNSTYRVVSVLTVLHQDWLNGKEYKCKVSNKALPAPIEKTISKAKGQPREPQVYTLPPSREEMTKNQVSLTCLVKGFYPSDIAVEWESNGQPENNYKTTPPVLDSDGSFFLYSKLTVDKSRWQQGNVFSCSVMHEALHNHYTQKSLSLSPGKSGGGSDIQMTQSPLSLPVTPGEPASISCRSSQSLLHSNGYNYLDWYLQKPGQSPQLLIYLGSNRASGVPDRFSGSGSGTDFTLKISRVEAEDVGVYYCMQALQTPWTFGQGTKVEIKRTGGGGSGGGGSGGGGSGGGGSEVQLLESGGGLVQPGGSLRLSCAASGFTFSQYVMSWVRQAPGKGLEWVSRIYPSGGVTKYADSVKGRFTISRDNSKNTLYLQMNSLRAEDTAVYYCTRQRYRGPKYYYYMDVWGKGTTVTVSS

SEQ ID NO: 111 - protein, 713 aa, Artificial Sequence
  Synthetic Polypeptide
EVQLLESGGGLVQPGGSLRLSCAASGFTFSHYIMMWVRQAPGKGLEWVSGIYSSGGITVYADSVKGRFTISRDNSKNTLYLQMNSLRAEDTAVYYCAYRRIGVPRRDEFDIWGQGTMVTVSSASTKGPSVFPLAPSSKSTSGGTAALGCLVKDYFPEPVTVSWNSGALTSGVHTFPAVLQSSGLYSLSSVVTVPSSSLGTQTYICNVNHKPSNTKVDKRVEPKSCDKTHTCPPCPAPELLGGPSVFLFPPKPKDTLMISRTPEVTCVVVDVSHEDPEVKFNWYVDGVEVHNAKTKPREEQYNSTYRVVSVLTVLHQDWLNGKEYKCKVSNKALPAPIEKTISKAKGQPREPQVYTLPPSREEMTKNQVSLTCLVKGFYPSDIAVEWESNGQPENNYKTTPPVLDSDGSFFLYSKLTVDKSRWQQGNVFSCSVMHEALHNHYTQKSLSLSPGKSGGGSEVQLLESGGGLVQPGGSLRLSCAASGFTFSQYNMVWVRQAPGKGLEWVSRIWPSGGKTTYADSVKGRFTISRDNSKNTLYLQMNSLRAEDTAVYYCTRQRYRGPKYYYYMDVWGKGTTVTVSSGGGGSGGGGSGGGGSGGGGSDIQMTQSPLSLPVTPGEPASISCRSSQSLLHSNGYNYLDWYLQKPGQSPQLLIYLGSNRASGVPDRFSGSGSGTDFTLKISRVEAEDVGVYYCMQALQTPWTFGQGTKVEIKR

SEQ ID NO: 112 - protein, 714 aa, Artificial Sequence
  Synthetic Polypeptide
EVQLLESGGGLVQPGGSLRLSCAASGFTFSHYIMMWVRQAPGKGLEWVSGIYSSGGITVYADSVKGRFTISRDNSKNTLYLQMNSLRAEDTAVYYCAYRRIGVPRRDEFDIWGQGTMVTVSSASTKGPSVFPLAPSSKSTSGGTAALGCLVKDYFPEPVTVSWNSGALTSGVHTFPAVLQSSGLYSLSSVVTVPSSSLGTQTYICNVNHKPSNTKVDKRVEPKSCDKTHTCPPCPAPELLGGPSVFLFPPKPKDTLMISRTPEVTCVVVDVSHEDPEVKFNWYVDGVEVHNAKTKPREEQYNSTYRVVSVLTVLHQDWLNGKEYKCKVSNKALPAPIEKTISKAKGQPREPQVYTLPPSREEMTKNQVSLTCLVKGFYPSDIAVEWESNGQPENNYKTTPPVLDSDGSFFLYSKLTVDKSRWQQGNVFSCSVMHEALHNHYTQKSLSLSPGKSGGGSDIQMTQSPLSLPVTPGEPASISCRSSQSLLHSNGYNYLDWYLQKPGQSPQLLIYLGSNRASGVPDRFSGSGSGTDFTLKISRVEAEDVGVYYCMQALQTPWTFGQGTKVEIKRTGGGGSGGGGSGGGGSGGGGSEVQLLESGGGLVQPGGSLRLSCAASGFTFSQYNMVWVRQAPGKGLEWVSRIWPSGGKTTYADSVKGRFTISRDNSKNTLYLQMNSLRAEDTAVYYCTRQRYRGPKYYYYMDVWGKGTTVTVSS

SEQ ID NO: 113 - protein, 713 aa, Artificial Sequence
  Synthetic Polypeptide
EVQLLESGGGLVQPGGSLRLSCAASGFTFSHYIMMWVRQAPGKGLEWVSGIYSSGGITVYADSVKGRFTISRDNSKNTLYLQMNSLRAEDTAVYYCAYRRIGVPRRDEFDIWGQGTMVTVSSASTKGPSVFPLAPSSKSTSGGTAALGCLVKDYFPEPVTVSWNSGALTSGVHTFPAVLQSSGLYSLSSVVTVPSSSLGTQTYICNVNHKPSNTKVDKRVEPKSCDKTHTCPPCPAPELLGGPSVFLFPPKPKDTLMISRTPEVTCVVVDVSHEDPEVKFNWYVDGVEVHNAKTKPREEQYNSTYRVVSVLTVLHQDWLNGKEYKCKVSNKALPAPIEKTISKAKGQPREPQVYTLPPSREEMTKNQVSLTCLVKGFYPSDIAVEWESNGQPENNYKTTPPVLDSDGSFFLYSKLTVDKSRWQQGNVFSCSVMHEALHNHYTQKSLSLSPGKSGGGSEVQLLESGGGLVQPGGSLRLSCAASGFTFSQYTMVWVRQAPGKGLEWVSRIYPSGGVTQYADSVKGRFTISRDNSKNTLYLQMNSLRAEDTAVYYCTRQRYRGPKYYYYMDVWGKGTTVTVSSGGGGSGGGGSGGGGSGGGGSDIQMTQSPLSLPVTPGEPASISCRSSQSLLHSNGYNYLDWYLQKPGQSPQLLIYLGSNRASGVPDRFSGSGSGTDFTLKISRVEAEDVGVYYCMQALQTPWTFGQGTKVEIKR

SEQ ID NO: 114 - protein, 714 aa, Artificial Sequence
  Synthetic Polypeptide
EVQLLESGGGLVQPGGSLRLSCAASGFTFSHYIMMWVRQAPGKGLEWVSGIYSSGGITVYADSVKGRFTISRDNSKNTLYLQMNSLRAEDTAVYYCAYRRIGVPRRDEFDIWGQGTMVTVSSASTKGPSVFPLAPSSKSTSGGTAALGCLVKDYFPEPVTVSWNSGALTSGVHTFPAVLQSSGLYSLSSVVTVPSSSLGTQTYICNVNHKPSNTKVDKRVEPKSCDKTHTCPPCPAPELLGGPSVFLFPPKPKDTLMISRTPEVTCVVVDVSHEDPEVKFNWYVDGVEVHNAKTKPREEQYNSTYRVVSVLTVLHQDWLNGKEYKCKVSNKALPAPIEKTISKAKGQPREPQVYTLPPSREEMTKNQVSLTCLVKGFYPSDIAVEWESNGQPENNYKTTPPVLDSDGSFFLYSKLTVDKSRWQQGNVFSCSVMHEALHNHYTQKSLSLSPGKSGGGSDIQMTQSPLSLPVTPGEPASISCRSSQSLLHSNGYNYLDWYLQKPGQSPQLLIYLGSNRASGVPDRFSGSGSGTDFTLKISRVEAEDVGVYYCMQALQTPWTFGQGTKVEIKRTGGGGSGGGGSGGGGSGGGGSEVQLLESGGGLVQPGGSLRLSCAASGFTFSQYTMVWVRQAPGKGLEWVSRIYPSGGVTQYADSVKGRFTISRDNSKNTLYLQMNSLRAEDTAVYYCTRQRYRGPKYYYYMDVWGKGTTVTVSS

SEQ ID NO: 115 - protein, 713 aa, Artificial Sequence
  Synthetic Polypeptide
EVQLLESGGGLVQPGGSLRLSCAASGFTFSHYIMMWVRQAPGKGLEWVSGIYSSGGITVYADSVKGRFTISRDNSKNTLYLQMNSLRAEDTAVYYCAYRRIGVPRRDEFDIWGQGTMVTVSSASTKGPSVFPLAPSSKSTSGGTAALGCLVKDYFPEPVTVSWNSGALTSGVHTFPAVLQSSGLYSLSSVVTVPSSSLGTQTYICNVNHKPSNTKVDKRVEPKSCDKTHTCPPCPAPELLGGPSVFLFPPKPKDTLMISRTPEVTCVVVDVSHEDPEVKFNWYVDGVEVHNAKTKPREEQYNSTYRVVSVLTVLHQDWLNGKEYKCKVSNKALPAPIEKTISKAKGQPREPQVYTLPPSREEMTKNQVSLTCLVKGFYPSDIAVEWESNGQPENNYKTTPPVLDSDGSFFLYSKLTVDKSRWQQGNVFSCSVMHEALHNHYTQKSLSLSPGKSGGGSEVQLLESGGGLVQPGGSLRLSCAASGFTFSQYVMHWVRQAPGKGLEWVSRIYPSGGLTNYADSVKGRFTISRDNSKNTLYLQMNSLRAEDTAVYYCTRQRYRGPKYYYYMDVWGKGTTVTVSSGGGGSGGGGSGGGGSGGGGSDIQMTQSPLSLPVTPGEPASISCRSSQSLLHSNGYNYLDWYLQKPGQSPQLLIYLGSNRASGVPDRFSGSGSGTDFTLKISRVEAEDVGVYYCMQALQTPWTFGQGTKVEIKR

SEQ ID NO: 116 - protein, 714 aa, Artificial Sequence
  Synthetic Polypeptide
EVQLLESGGGLVQPGGSLRLSCAASGFTFSHYIMMWVRQAPGKGLEWVSGIYSSGGITVYADSVKGRFTISRDNSKNTLYLQMNSLRAEDTAVYYCAYRRIGVPRRDEFDIWGQGTMVTVSSASTKGPSVFPLAPSSKSTSGGTAALGCLVKDYFPEPVTVSWNSGALTSGVHTFPAVLQSSGLYSLSSVVTVPSSSLGTQTYICNVNHKPSNTKVDKRVEPKSCDKTHTCPPCPAPELLGGPSVFLFPPKPKDTLMISRTPEVTCVVVDVSHEDPEVKFNWYVDGVEVHNAKTKPREEQYNSTYRVVSVLTVLHQDWLNGKEYKCKVSNKALPAPIEKTISKAKGQPREPQVYTLPPSREEMTKNQVSLTCLVKGFYPSDIAVEWESNGQPENNYKTTPPVLDSDGSFFLYSKLTVDKSRWQQGNVFSCSVMHEALHNHYTQKSLSLSPGKSGGGSDIQMTQSPLSLPVTPGEPASISCRSSQSLLHSNGYNYLDWYLQKPGQSPQLLIYLGSNRASGVPDRFSGSGSGTDFTLKISRVEAEDVGVYYCMQALQTPWTFGQGTKVEIKRTGGGGSGGGGSGGGGSGGGGSEVQLLESGGGLVQPGGSLRLSCAASGFTFSQYVMHWVRQAPGKGLEWVSRIYPSGGLTNYADSVKGRFTISRDNSKNTLYLQMNSLRAEDTAVYYCTRQRYRGPKYYYYMDVWGKGTTVTVSS

SEQ ID NO: 117 - protein, 713 aa, Artificial Sequence
  Synthetic Polypeptide
EVQLLESGGGLVQPGGSLRLSCAASGFTFSHYIMMWVRQAPGKGLEWVSGIYSSGGITVYADSVKGRFTISRDNSKNTLYLQMNSLRAEDTAVYYCAYRRIGVPRRDEFDIWGQGTMVTVSSASTKGPSVFPLAPSSKSTSGGTAALGCLVKDYFPEPVTVSWNSGALTSGVHTFPAVLQSSGLYSLSSVVTVPSSSLGTQTYICNVNHKPSNTKVDKRVEPKSCDKTHTCPPCPAPELLGGPSVFLFPPKPKDTLMISRTPEVTCVVVDVSHEDPEVKFNWYVDGVEVHNAKTKPREEQYNSTYRVVSVLTVLHQDWLNGKEYKCKVSNKALPAPIEKTISKAKGQPREPQVYTLPPSREEMTKNQVSLTCLVKGFYPSDIAVEWESNGQPENNYKTTPPVLDSDGSFFLYSKLTVDKSRWQQGNVFSCSVMHEALHNHYTQKSLSLSPGKSGGGSEVQLLESGGGLVQPGGSLRLSCAASGFTFSQYVMHWVRQAPGKGLEWVSSIWPSGGHTRYADSVKGRFTISRDNSKNTLYLQMNSLRAEDTAVYYCTRQRYRGPKYYYYMDVWGKGTTVTVSSGGGGSGGGGSGGGGSGGGGSDIQMTQSPLSLPVTPGEPASISCRSSQSLLHSNGYNYLDWYLQKPGQSPQLLIYLGSNRASGVPDRFSGSGSGTDFTLKISRVEAEDVGVYYCMQALQTPWTFGQGTKVEIKR

SEQ ID NO: 118 - protein, 714 aa, Artificial Sequence
  Synthetic Polypeptide
EVQLLESGGGLVQPGGSLRLSCAASGFTFSHYIMMWVRQAPGKGLEWVSGIYSSGGITVYADSVKGRFTISRDNSKNTLYLQMNSLRAEDTAVYYCAYRRIGVPRRDEFDIWGQGTMVTVSSASTKGPSVFPLAPSSKSTSGGTAALGCLVKDYFPEPVTVSWNSGALTSGVHTFPAVLQSSGLYSLSSVVTVPSSSLGTQTYICNVNHKPSNTKVDKRVEPKSCDKTHTCPPCPAPELLGGPSVFLFPPKPKDTLMISRTPEVTCVVVDVSHEDPEVKFNWYVDGVEVHNAKTKPREEQYNSTYRVVSVLTVLHQDWLNGKEYKCKVSNKALPAPIEKTISKAKGQPREPQVYTLPPSREEMTKNQVSLTCLVKGFYPSDIAVEWESNGQPENNYKTTPPVLDSDGSFFLYSKLTVDKSRWQQGNVFSCSVMHEALHNHYTQKSLSLSPGKSGGGSDIQMTQSPLSLPVTPGEPASISCRSSQSLLHSNGYNYLDWYLQKPGQSPQLLIYLGSNRASGVPDRFSGSGSGTDFTLKISRVEAEDVGVYYCMQALQTPWTFGQGTKVEIKRTGGGGSGGGGSGGGGSGGGGSEVQLLESGGGLVQPGGSLRLSCAASGFTFSQYVMHWVRQAPGKGLEWVSSIWPSGGHTRYADSVKGRFTISRDNSKNTLYLQMNSLRAEDTAVYYCTRQRYRGPKYYYYMDVWGKGTTVTVSS

SEQ ID NO: 119 - protein, 713 aa, Artificial Sequence
  Synthetic Polypeptide
EVQLLESGGGLVQPGGSLRLSCAASGFTFSHYIMMWVRQAPGKGLEWVSGIYSSGGITVYADSVKGRFTISRDNSKNTLYLQMNSLRAEDTAVYYCAYRRIGVPRRDEFDIWGQGTMVTVSSASTKGPSVFPLAPSSKSTSGGTAALGCLVKDYFPEPVTVSWNSGALTSGVHTFPAVLQSSGLYSLSSVVTVPSSSLGTQTYICNVNHKPSNTKVDKRVEPKSCDKTHTCPPCPAPELLGGPSVFLFPPKPKDTLMISRTPEVTCVVVDVSHEDPEVKFNWYVDGVEVHNAKTKPREEQYNSTYRVVSVLTVLHQDWLNGKEYKCKVSNKALPAPIEKTISKAKGQPREPQVYTLPPSREEMTKNQVSLTCLVKGFYPSDIAVEWESNGQPENNYKTTPPVLDSDGSFFLYSKLTVDKSRWQQGNVFSCSVMHEALHNHYTQKSLSLSPGKSGGGSEVQLLESGGGLVQPGGSLRLSCAASGFTFSNYVMHWVRQAPGKGLEWVSSIWPSGGKTKYADSVKGRFTISRDNSKNTLYLQMNSLRAEDTAVYYCTRQRYRGPKYYYYMDAWGQGTTVTVSSGGGGSGGGGSGGGGSGGGGSDIQMTQSPLSLPVTPGEPASISCRSSQSLLHSNGYNYLDWYLQKPGQSPQLLIYLGSNRASGVPDRFSGSGSGTDFTLKISRVEAEDVGVYYCMQALQTPWTFGQGTKVEIKR

SEQ ID NO: 120 - protein, 714 aa, Artificial Sequence
  Synthetic Polypeptide
EVQLLESGGGLVQPGGSLRLSCAASGFTFSHYIMMWVRQAPGKGLEWVSGIYSSGGITVYADSVKGRFTISRDNSKNTLYLQMNSLRAEDTAVYYCAYRRIGVPRRDEFDIWGQGTMVTVSSASTKGPSVFPLAPSSKSTSGGTAALGCLVKDYFPEPVTVSWNSGALTSGVHTFPAVLQSSGLYSLSSVVTVPSSSLGTQTYICNVNHKPSNTKVDKRVEPKSCDKTHTCPPCPAPELLGGPSVFLFPPKPKDTLMISRTPEVTCVVVDVSHEDPEVKFNWYVDGVEVHNAKTKPREEQYNSTYRVVSVLTVLHQDWLNGKEYKCKVSNKALPAPIEKTISKAKGQPREPQVYTLPPSREEMTKNQVSLTCLVKGFYPSDIAVEWESNGQPENNYKTTPPVLDSDGSFFLYSKLTVDKSRWQQGNVFSCSVMHEALHNHYTQKSLSLSPGKSGGGSDIQMTQSPLSLPVTPGEPASISCRSSQSLLHSNGYNYLDWYLQKPGQSPQLLIYLGSNRASGVPDRFSGSGSGTDFTLKISRVEAEDVGVYYCMQALQTPWTFGQGTKVEIKRTGGGGSGGGGSGGGGSGGGGSEVQLLESGGGLVQPGGSLRLSCAASGFTFSNYVMHWVRQAPGKGLEWVSSIWPSGGKTKYADSVKGRFTISRDNSKNTLYLQMNSLRAEDTAVYYCTRQRYRGPKYYYYMDAWGQGTTVTVSS

SEQ ID NO: 121 - protein, 713 aa, Artificial Sequence
  Synthetic Polypeptide
EVQLLESGGGLVQPGGSLRLSCAASGFTFSHYIMMWVRQAPGKGLEWVSGIYSSGGITVYADSVKGRFTISRDNSKNTLYLQMNSLRAEDTAVYYCAYRRIGVPRRDEFDIWGQGTMVTVSSASTKGPSVFPLAPSSKSTSGGTAALGCLVKDYFPEPVTVSWNSGALTSGVHTFPAVLQSSGLYSLSSVVTVPSSSLGTQTYICNVNHKPSNTKVDKRVEPKSCDKTHTCPPCPAPELLGGPSVFLFPPKPKDTLMISRTPEVTCVVVDVSHEDPEVKFNWYVDGVEVHNAKTKPREEQYNSTYRVVSVLTVLHQDWLNGKEYKCKVSNKALPAPIEKTISKAKGQPREPQVYTLPPSREEMTKNQVSLTCLVKGFYPSDIAVEWESNGQPENNYKTTPPVLDSDGSFFLYSKLTVDKSRWQQGNVFSCSVMHEALHNHYTQKSLSLSPGKSGGGSEVQLLESGGGLVQPGGSLRLSCAASGFTFSFYSMHWVRQAPGKGLEWVSRIYPSGGITSYADSVKGRFTISRDNSKNTLYLQMNSLRAEDTAVYYCTRQRYRGPKYYYYMDVWGKGTTVTVSSGGGGSGGGGSGGGGSGGGGSDIQMTQSPLSLPVTPGEPASISCRSSQSLLHSNGYNYLDWYLQKPGQSPQLLIYLGSNRASGVPDRFSGSGSGTDFTLKISRVEAEDVGVYYCMQALQTPWTFGQGTKVEIKR

SEQ ID NO: 122 - protein, 714 aa, Artificial Sequence
  Synthetic Polypeptide
EVQLLESGGGLVQPGGSLRLSCAASGFTFSHYIMMWVRQAPGKGLEWVSGIYSSGGITVYADSVKGRFTISRDNSKNTLYLQMNSLRAEDTAVYYCAYRRIGVPRRDEFDIWGQGTMVTVSSASTKGPSVFPLAPSSKSTSGGTAALGCLVKDYFPEPVTVSWNSGALTSGVHTFPAVLQSSGLYSLSSVVTVPSSSLGTQTYICNVNHKPSNTKVDKRVEPKSCDKTHTCPPCPAPELLGGPSVFLFPPKPKDTLMISRTPEVTCVVVDVSHEDPEVKFNWYVDGVEVHNAKTKPREEQYNSTYRVVSVLTVLHQDWLNGKEYKCKVSNKALPAPIEKTISKAKGQPREPQVYTLPPSREEMTKNQVSLTCLVKGFYPSDIAVEWESNGQPENNYKTTPPVLDSDGSFFLYSKLTVDKSRWQQGNVFSCSVMHEALHNHYTQKSLSLSPGKSGGGSDIQMTQSPLSLPVTPGEPASISCRSSQSLLHSNGYNYLDWYLQKPGQSPQLLIYLGSNRASGVPDRFSGSGSGTDFTLKISRVEAEDVGVYYCMQALQTPWTFGQGTKVEIKRTGGGGSGGGGSGGGGSGGGGSEVQLLESGGGLVQPGGSLRLSCAASGFTFSFYSMHWVRQAPGKGLEWVSRIYPSGGITSYADSVKGRFTISRDNSKNTLYLQMNSLRAEDTAVYYCTRQRYRGPKYYYYMDVWGKGTTVTVSS

SEQ ID NO: 123 - protein, 123 aa, Artificial Sequence
  Synthetic Polypeptide
EVQLLESGGGLVQPGGSLRLSCAASGFTFSQYVMHWVRQAPGKCLEWVSSIWPSGGHTRYADSVKGRFTISRDNSKNTLYLQMNSLRAEDTAVYYCARQRYRGPKYYYYMDVWGQGTTVTVSS

SEQ ID NO: 124 - protein, 123 aa, Artificial Sequence
  Synthetic Polypeptide
EVQLLESGGGLVQPGGSLRLSCAASGFTFSWYVMHWVRQAPGKCLEWVSSIYPSGGKTSYADSVKGRFTISRDNSKNTLYLQMNSLRAEDTAVYYCARQRYRGPKYYYYMDVWGQGTTVTVSS

SEQ ID NO: 125 - protein, 123 aa, Artificial Sequence
  Synthetic Polypeptide
EVQLLESGGGLVQPGGSLRLSCAASGFTFSWYSMHWVRQAPGKCLEWVSVIYPSGGKTRYADSVKGRFTISRDNSKNTLYLQMNSLRAEDTAVYYCARQRYRGPKYYYYMDVWGQGTTVTVSS

SEQ ID NO: 126 - protein, 123 aa, Artificial Sequence
  Synthetic Polypeptide
EVQLLESGGGLVQPGGSLRLSCAASGFTFSHYVMHWVRQAPGKCLEWVSSIYPSGGLTKYADSVKGRFTISRDNSKNTLYLQMNSLRAEDTAVYYCARQRYRGPKYYYYMDVWGQGTTVTVSS

SEQ ID NO: 127 - protein, 113 aa, Artificial Sequence
  Synthetic Polypeptide
DIVMTQSPLSLPVTPGEPASISCRSSQSLLHSNGYNYLDWYLQKPGQSPQLLIYLGSNRASGVPDRFSGSGSGTDFTLKISRVEAEDVGVYYCMQALQTPWTFGCGTKVEIKR

SEQ ID NO: 128 - protein, 113 aa, Artificial Sequence; identical to SEQ ID NO: 127
  Synthetic Polypeptide

SEQ ID NO: 129 - protein, 113 aa, Artificial Sequence; identical to SEQ ID NO: 127
  Synthetic Polypeptide

SEQ ID NO: 130 - protein, 113 aa, Artificial Sequence; identical to SEQ ID NO: 127
  Synthetic Polypeptide

SEQ ID NO: 131 - protein, 16 aa, Artificial Sequence
  Synthetic Polypeptide
RSSQSLLHSNGYNYLD

SEQ ID NO: 132 - protein, 5 aa, Artificial Sequence
  Synthetic Polypeptide
QYVMH

SEQ ID NO: 133 - protein, 17 aa, Artificial Sequence
  Synthetic Polypeptide
SIWPSGGHTRYADSVKG

SEQ ID NO: 134 - protein, 14 aa, Artificial Sequence
  Synthetic Polypeptide
QRYRGPKYYYYMDV

SEQ ID NO: 135 - protein, 5 aa, Artificial Sequence
  Synthetic Polypeptide
WYVMH

SEQ ID NO: 136 - protein, 17 aa, Artificial Sequence
  Synthetic Polypeptide
SIYPSGGKTSYADSVKG

SEQ ID NO: 137 - protein, 5 aa, Artificial Sequence
  Synthetic Polypeptide
WYSMH

SEQ ID NO: 138 - protein, 17 aa, Artificial Sequence
  Synthetic Polypeptide
VIYPSGGKTRYADSVKG

SEQ ID NO: 139 - protein, 5 aa, Artificial Sequence
  Synthetic Polypeptide
HYVMH

SEQ ID NO: 140 - protein, 17 aa, Artificial Sequence
  Synthetic Polypeptide
SIYPSGGLTKYADSVKG

SEQ ID NO: 141 - protein, 712 aa, Artificial Sequence
  Synthetic Polypeptide
EVQLLESGGGLVQPGGSLRLSCAASGFTFSHYIMMWVRQAPGKGLEWVSGIYSSGGITVYADSVKGRFTISRDNSKNTLYLQMNSLRAEDTAVYYCAYRRIGVPRRDEFDIWGQGTMVTVSSASTKGPSVFPLAPSSKSTSGGTAALGCLVKDYFPEPVTVSWNSGALTSGVHTFPAVLQSSGLYSLSSVVTVPSSSLGTQTYICNVNHKPSNTKVDKRVEPKSCDKTHTCPPCPAPELLGGPSVFLFPPKPKDTLMISRTPEVTCVVVDVSHEDPEVKFNWYVDGVEVHNAKTKPREEQYNSTYRVVSVLTVLHQDWLNGKEYKCKVSNKALPAPIEKTISKAKGQPREPQVYTLPPSREEMTKNQVSLTCLVKGFYPSDIAVEWESNGQPENNYKTTPPVLDSDGSFFLYSKLTVDKSRWQQGNVFSCSVMHEALHNHYTQKSLSLSPGSGGGSEVQLLESGGGLVQPGGSLRLSCAASGFTFSQYVMHWVRQAPGKCLEWVSSIWPSGGHTRYADSVKGRFTISRDNSKNTLYLQMNSLRAEDTAVYYCARQRYRGPKYYYYMDVWGQGTTVTVSSGGGGSGGGGSGGGGSGGGGSDIVMTQSPLSLPVTPGEPASISCRSSQSLLHSNGYNYLDWYLQKPGQSPQLLIYLGSNRASGVPDRFSGSGSGTDFTLKISRVEAEDVGVYYCMQALQTPWTFGCGTKVEIKR

SEQ ID NO: 142 - protein, 713 aa, Artificial Sequence
  Synthetic Polypeptide
EVQLLESGGGLVQPGGSLRLSCAASGFTFSHYIMMWVRQAPGKGLEWVSGIYSSGGITVYADSVKGRFTISRDNSKNTLYLQMNSLRAEDTAVYYCAYRRIGVPRRDEFDIWGQGTMVTVSSASTKGPSVFPLAPSSKSTSGGTAALGCLVKDYFPEPVTVSWNSGALTSGVHTFPAVLQSSGLYSLSSVVTVPSSSLGTQTYICNVNHKPSNTKVDKRVEPKSCDKTHTCPPCPAPELLGGPSVFLFPPKPKDTLMISRTPEVTCVVVDVSHEDPEVKFNWYVDGVEVHNAKTKPREEQYNSTYRVVSVLTVLHQDWLNGKEYKCKVSNKALPAPIEKTISKAKGQPREPQVYTLPPSREEMTKNQVSLTCLVKGFYPSDIAVEWESNGQPENNYKTTPPVLDSDGSFFLYSKLTVDKSRWQQGNVFSCSVMHEALHNHYTQKSLSLSPGGSGGGSEVQLLESGGGLVQPGGSLRLSCAASGFTFSQYVMHWVRQAPGKCLEWVSSIWPSGGHTRYADSVKGRFTISRDNSKNTLYLQMNSLRAEDTAVYYCARQRYRGPKYYYYMDVWGQGTTVTVSSGGGGSGGGGSGGGGSGGGGSDIVMTQSPLSLPVTPGEPASISCRSSQSLLHSNGYNYLDWYLQKPGQSPQLLIYLGSNRASGVPDRFSGSGSGTDFTLKISRVEAEDVGVYYCMQALQTPWTFGCGTKVEIKR

SEQ ID NO: 143 - protein, 712 aa, Artificial Sequence
  Synthetic Polypeptide
EVQLLESGGGLVQPGGSLRLSCAASGFTFSHYIMMWVRQAPGKGLEWVSGIYSSGGITVYADSVKGRFTISRDNSKNTLYLQMNSLRAEDTAVYYCAYRRIGVPRRDEFDIWGQGTMVTVSSASTKGPSVFPLAPSSKSTSGGTAALGCLVKDYFPEPVTVSWNSGALTSGVHTFPAVLQSSGLYSLSSVVTVPSSSLGTQTYICNVNHKPSNTKVDKRVEPKSCDKTHTCPPCPAPELLGGPSVFLFPPKPKDTLMISRTPEVTCVVVDVSHEDPEVKFNWYVDGVEVHNAKTKPREEQYNSTYRVVSVLTVLHQDWLNGKEYKCKVSNKALPAPIEKTISKAKGQPREPQVYTLPPSREEMTKNQVSLTCLVKGFYPSDIAVEWESNGQPENNYKTTPPVLDSDGSFFLYSKLTVDKSRWQQGNVFSCSVMHEALHNHYTQKSLSLSPGSGGGSEVQLLESGGGLVQPGGSLRLSCAASGFTFSWYVMHWVRQAPGKCLEWVSSIYPSGGKTSYADSVKGRFTISRDNSKNTLYLQMNSLRAEDTAVYYCARQRYRGPKYYYYMDVWGQGTTVTVSSGGGGSGGGGSGGGGSGGGGSDIVMTQSPLSLPVTPGEPASISCRSSQSLLHSNGYNYLDWYLQKPGQSPQLLIYLGSNRASGVPDRFSGSGSGTDFTLKISRVEAEDVGVYYCMQALQTPWTFGCGTKVEIKR

SEQ ID NO: 144 - protein, 713 aa, Artificial Sequence
  Synthetic Polypeptide
EVQLLESGGGLVQPGGSLRLSCAASGFTFSHYIMMWVRQAPGKGLEWVSGIYSSGGITVYADSVKGRFTISRDNSKNTLYLQMNSLRAEDTAVYYCAYRRIGVPRRDEFDIWGQGTMVTVSSASTKGPSVFPLAPSSKSTSGGTAALGCLVKDYFPEPVTVSWNSGALTSGVHTFPAVLQSSGLYSLSSVVTVPSSSLGTQTYICNVNHKPSNTKVDKRVEPKSCDKTHTCPPCPAPELLGGPSVFLFPPKPKDTLMISRTPEVTCVVVDVSHEDPEVKFNWYVDGVEVHNAKTKPREEQYNSTYRVVSVLTVLHQDWLNGKEYKCKVSNKALPAPIEKTISKAKGQPREPQVYTLPPSREEMTKNQVSLTCLVKGFYPSDIAVEWESNGQPENNYKTTPPVLDSDGSFFLYSKLTVDKSRWQQGNVFSCSVMHEALHNHYTQKSLSLSPGGSGGGSEVQLLESGGGLVQPGGSLRLSCAASGFTFSWYVMHWVRQAPGKCLEWVSSIYPSGGKTSYADSVKGRFTISRDNSKNTLYLQMNSLRAEDTAVYYCARQRYRGPKYYYYMDVWGQGTTVTVSSGGGGSGGGGSGGGGSGGGGSDIVMTQSPLSLPVTPGEPASISCRSSQSLLHSNGYNYLDWYLQKPGQSPQLLIYLGSNRASGVPDRFSGSGSGTDFTLKISRVEAEDVGVYYCMQALQTPWTFGCGTKVEIKR

SEQ ID NO: 145 - protein, 712 aa, Artificial Sequence
  Synthetic Polypeptide
EVQLLESGGGLVQPGGSLRLSCAASGFTFSHYIMMWVRQAPGKGLEWVSGIYSSGGITVYADSVKGRFTISRDNSKNTLYLQMNSLRAEDTAVYYCAYRRIGVPRRDEFDIWGQGTMVTVSSASTKGPSVFPLAPSSKSTSGGTAALGCLVKDYFPEPVTVSWNSGALTSGVHTFPAVLQSSGLYSLSSVVTVPSSSLGTQTYICNVNHKPSNTKVDKRVEPKSCDKTHTCPPCPAPELLGGPSVFLFPPKPKDTLMISRTPEVTCVVVDVSHEDPEVKFNWYVDGVEVHNAKTKPREEQYNSTYRVVSVLTVLHQDWLNGKEYKCKVSNKALPAPIEKTISKAKGQPREPQVYTLPPSREEMTKNQVSLTCLVKGFYPSDIAVEWESNGQPENNYKTTPPVLDSDGSFFLYSKLTVDKSRWQQGNVFSCSVMHEALHNHYTQKSLSLSPGSGGGSEVQLLESGGGLVQPGGSLRLSCAASGFTFSHYVMHWVRQAPGKCLEWVSSIYPSGGLTKYADSVKGRFTISRDNSKNTLYLQMNSLRAEDTAVYYCARQRYRGPKYYYYMDVWGQGTTVTVSSGGGGSGGGGSGGGGSGGGGSDIVMTQSPLSLPVTPGEPASISCRSSQSLLHSNGYNYLDWYLQKPGQSPQLLIYLGSNRASGVPDRFSGSGSGTDFTLKISRVEAEDVGVYYCMQALQTPWTFGCGTKVEIKR

SEQ ID NO: 146 - protein, 713 aa, Artificial Sequence
  Synthetic Polypeptide
EVQLLESGGGLVQPGGSLRLSCAASGFTFSHYIMMWVRQAPGKGLEWVSGIYSSGGITVYADSVKGRFTISRDNSKNTLYLQMNSLRAEDTAVYYCAYRRIGVPRRDEFDIWGQGTMVTVSSASTKGPSVFPLAPSSKSTSGGTAALGCLVKDYFPEPVTVSWNSGALTSGVHTFPAVLQSSGLYSLSSVVTVPSSSLGTQTYICNVNHKPSNTKVDKRVEPKSCDKTHTCPPCPAPELLGGPSVFLFPPKPKDTLMISRTPEVTCVVVDVSHEDPEVKFNWYVDGVEVHNAKTKPREEQYNSTYRVVSVLTVLHQDWLNGKEYKCKVSNKALPAPIEKTISKAKGQPREPQVYTLPPSREEMTKNQVSLTCLVKGFYPSDIAVEWESNGQPENNYKTTPPVLDSDGSFFLYSKLTVDKSRWQQGNVFSCSVMHEALHNHYTQKSLSLSPGGSGGGSEVQLLESGGGLVQPGGSLRLSCAASGFTFSHYVMHWVRQAPGKCLEWVSSIYPSGGLTKYADSVKGRFTISRDNSKNTLYLQMNSLRAEDTAVYYCARQRYRGPKYYYYMDVWGQGTTVTVSSGGGGSGGGGSGGGGSGGGGSDIVMTQSPLSLPVTPGEPASISCRSSQSLLHSNGYNYLDWYLQKPGQSPQLLIYLGSNRASGVPDRFSGSGSGTDFTLKISRVEAEDVGVYYCMQALQTPWTFGCGTKVEIKR

SEQ ID NO: 147 - protein, 712 aa, Artificial Sequence
  Synthetic Polypeptide
EVQLLESGGGLVQPGGSLRLSCAASGFTFSHYIMMWVRQAPGKGLEWVSGIYSSGGITVYADSVKGRFTISRDNSKNTLYLQMNSLRAEDTAVYYCAYRRIGVPRRDEFDIWGQGTMVTVSSASTKGPSVFPLAPSSKSTSGGTAALGCLVKDYFPEPVTVSWNSGALTSGVHTFPAVLQSSGLYSLSSVVTVPSSSLGTQTYICNVNHKPSNTKVDKRVEPKSCDKTHTCPPCPAPELLGGPSVFLFPPKPKDTLMISRTPEVTCVVVDVSHEDPEVKFNWYVDGVEVHNAKTKPREEQYNSTYRVVSVLTVLHQDWLNGKEYKCKVSNKALPAPIEKTISKAKGQPREPQVYTLPPSREEMTKNQVSLTCLVKGFYPSDIAVEWESNGQPENNYKTTPPVLDSDGSFFLYSKLTVDKSRWQQGNVFSCSVMHEALHNHYTQKSLSLSPGSGGGSEVQLLESGGGLVQPGGSLRLSCAASGFTFSWYSMHWVRQAPGKCLEWVSVIYPSGGKTRYADSVKGRFTISRDNSKNTLYLQMNSLRAEDTAVYYCARQRYRGPKYYYYMDVWGQGTTVTVSSGGGGSGGGGSGGGGSGGGGSDIVMTQSPLSLPVTPGEPASISCRSSQSLLHSNGYNYLDWYLQKPGQSPQLLIYLGSNRASGVPDRFSGSGSGTDFTLKISRVEAEDVGVYYCMQALQTPWTFGCGTKVEIKR

SEQ ID NO: 148 - protein, 713 aa, Artificial Sequence
  Synthetic Polypeptide
EVQLLESGGGLVQPGGSLRLSCAASGFTFSHYIMMWVRQAPGKGLEWVSGIYSSGGITVYADSVKGRFTISRDNSKNTLYLQMNSLRAEDTAVYYCAYRRIGVPRRDEFDIWGQGTMVTVSSASTKGPSVFPLAPSSKSTSGGTAALGCLVKDYFPEPVTVSWNSGALTSGVHTFPAVLQSSGLYSLSSVVTVPSSSLGTQTYICNVNHKPSNTKVDKRVEPKSCDKTHTCPPCPAPELLGGPSVFLFPPKPKDTLMISRTPEVTCVVVDVSHEDPEVKFNWYVDGVEVHNAKTKPREEQYNSTYRVVSVLTVLHQDWLNGKEYKCKVSNKALPAPIEKTISKAKGQPREPQVYTLPPSREEMTKNQVSLTCLVKGFYPSDIAVEWESNGQPENNYKTTPPVLDSDGSFFLYSKLTVDKSRWQQGNVFSCSVMHEALHNHYTQKSLSLSPGGSGGGSEVQLLESGGGLVQPGGSLRLSCAASGFTFSWYSMHWVRQAPGKCLEWVSVIYPSGGKTRYADSVKGRFTISRDNSKNTLYLQMNSLRAEDTAVYYCARQRYRGPKYYYYMDVWGQGTTVTVSSGGGGSGGGGSGGGGSGGGGSDIVMTQSPLSLPVTPGEPASISCRSSQSLLHSNGYNYLDWYLQKPGQSPQLLIYLGSNRASGVPDRFSGSGSGTDFTLKISRVEAEDVGVYYCMQALQTPWTFGCGTKVEIKR

SEQ ID NO: 149 - protein, 470 aa, Artificial Sequence
  Synthetic Polypeptide
MGWSCIILFLVATATGAHSEVQLLESGGGLVQPGGSLRLSCAASGFTFSHYIMMWVRQAPGKGLEWVSGIYSSGGITVYADSVKGRFTISRDNSKNTLYLQMNSLRAEDTAVYYCAYRRIGVPRRDEFDIWGQGTMVTVSSASTKGPSVFPLAPSSKSTSGGTAALGCLVKDYFPEPVTVSWNSGALTSGVHTFPAVLQSSGLYSLSSVVTVPSSSLGTQTYICNVNHKPSNTKVDKRVEPKSCDKTHTCPPCPAPELLGGPSVFLFPPKPKDTLMISRTPEVTCVVVDVSHEDPEVKFNWYVDGVEVHNAKTKPREEQYNSTYRVVSVLTVLHQDWLNGKEYKCKVSNKALPAPIEKTISKAKGQPREPQVYTLPPSREEMTKNQVSLTCLVKGFYPSDIAVEWESNGQPENNYKTTPPVLDSDGSFFLYSKLTVDKSRWQQGNVFSCSVMHEALHNHYTQKSLSLSPG

SEQ ID NO: 150 - protein, 471 aa, Artificial Sequence
  Synthetic Polypeptide
MGWSCIILFLVATATGAHSEVQLLESGGGLVQPGGSLRLSCAASGFTFSHYIMMWVRQAPGKGLEWVSGIYSSGGITVYADSVKGRFTISRDNSKNTLYLQMNSLRAEDTAVYYCAYRRIGVPRRDEFDIWGQGTMVTVSSASTKGPSVFPLAPSSKSTSGGTAALGCLVKDYFPEPVTVSWNSGALTSGVHTFPAVLQSSGLYSLSSVVTVPSSSLGTQTYICNVNHKPSNTKVDKRVEPKSCDKTHTCPPCPAPELLGGPSVFLFPPKPKDTLMISRTPEVTCVVVDVSHEDPEVKFNWYVDGVEVHNAKTKPREEQYNSTYRVVSVLTVLHQDWLNGKEYKCKVSNKALPAPIEKTISKAKGQPREPQVYTLPPSREEMTKNQVSLTCLVKGFYPSDIAVEWESNGQPENNYKTTPPVLDSDGSFFLYSKLTVDKSRWQQGNVFSCSVMHEALHNHYTQKSLSLSPGG

SEQ ID NO: 151 - protein, 710 aa, Artificial Sequence
  Synthetic Polypeptide
EVQLLESGGGLVQPGGSLRLSCAASGFTFSHYIMMWVRQAPGKGLEWVSGIYSSGGITVYADSVKGRFTISRDNSKNTLYLQMNSLRAEDTAVYYCAYRRIGVPRRDEFDIWGQGTMVTVSSASTKGPSVFPLAPSSKSTSGGTAALGCLVKDYFPEPVTVSWNSGALTSGVHTFPAVLQSSGLYSLSSVVTVPSSSLGTQTYICNVNHKPSNTKVDKRVEPKSCDKTHTCPPCPAPELLGGPSVFLFPPKPKDTLMISRTPEVTCVVVDVSHEDPEVKFNWYVDGVEVHNAKTKPREEQYNSTYRVVSVLTVLHQDWLNGKEYKCKVSNKALPAPIEKTISKAKGQPREPQVYTLPPSREEMTKNQVSLTCLVKGFYPSDIAVEWESNGQPENNYKTTPPVLDSDGSFFLYSKLTVDKSRWQQGNVFSCSVMHEALHNHYTQKSLSLSPGSGGGSEVQLLESGGGLVQPGGSLRLSCAASGFTFSQYVMHWVRQAPGKCLEWVSSIWPSGGHTRYADSVKGRFTISRDNSKNTLYLQMNSLRAEDTAVYYCARQRYRGPKYYYYMDVWGQGTTVTVSSGGGGSGGGGSGGGGSGGGGSDIVMTQSPLSLPVTPGEPASISCRSSQSLLHSNGYNYLDWYLQKPGQSPQLLIYLGSNRASGVPDRFSGSGSGTDFTLKISRVEAEDVGVYYCMQALQTPWTFGCGTKVEI

SEQ ID NO: 152 - protein, 711 aa, Artificial Sequence
  Synthetic Polypeptide
EVQLLESGGGLVQPGGSLRLSCAASGFTFSHYIMMWVRQAPGKGLEWVSGIYSSGGITVYADSVKGRFTISRDNSKNTLYLQMNSLRAEDTAVYYCAYRRIGVPRRDEFDIWGQGTMVTVSSASTKGPSVFPLAPSSKSTSGGTAALGCLVKDYFPEPVTVSWNSGALTSGVHTFPAVLQSSGLYSLSSVVTVPSSSLGTQTYICNVNHKPSNTKVDKRVEPKSCDKTHTCPPCPAPELLGGPSVFLFPPKPKDTLMISRTPEVTCVVVDVSHEDPEVKFNWYVDGVEVHNAKTKPREEQYNSTYRVVSVLTVLHQDWLNGKEYKCKVSNKALPAPIEKTISKAKGQPREPQVYTLPPSREEMTKNQVSLTCLVKGFYPSDIAVEWESNGQPENNYKTTPPVLDSDGSFFLYSKLTVDKSRWQQGNVFSCSVMHEALHNHYTQKSLSLSPGGSGGGSEVQLLESGGGLVQPGGSLRLSCAASGFTFSQYVMHWVRQAPGKCLEWVSSIWPSGGHTRYADSVKGRFTISRDNSKNTLYLQMNSLRAEDTAVYYCARQRYRGPKYYYYMDVWGQGTTVTVSSGGGGSGGGGSGGGGSGGGGSDIVMTQSPLSLPVTPGEPASISCRSSQSLLHSNGYNYLDWYLQKPGQSPQLLIYLGSNRASGVPDRFSGSGSGTDFTLKISRVEAEDVGVYYCMQALQTPWTFGCGTKVEI

SEQ ID NO: 153 - protein, 710 aa, Artificial Sequence
  Synthetic Polypeptide
EVQLLESGGGLVQPGGSLRLSCAASGFTFSHYIMMWVRQAPGKGLEWVSGIYSSGGITVYADSVKGRFTISRDNSKNTLYLQMNSLRAEDTAVYYCAYRRIGVPRRDEFDIWGQGTMVTVSSASTKGPSVFPLAPSSKSTSGGTAALGCLVKDYFPEPVTVSWNSGALTSGVHTFPAVLQSSGLYSLSSVVTVPSSSLGTQTYICNVNHKPSNTKVDKRVEPKSCDKTHTCPPCPAPELLGGPSVFLFPPKPKDTLMISRTPEVTCVVVDVSHEDPEVKFNWYVDGVEVHNAKTKPREEQYNSTYRVVSVLTVLHQDWLNGKEYKCKVSNKALPAPIEKTISKAKGQPREPQVYTLPPSREEMTKNQVSLTCLVKGFYPSDIAVEWESNGQPENNYKTTPPVLDSDGSFFLYSKLTVDKSRWQQGNVFSCSVMHEALHNHYTQKSLSLSPGSGGGSEVQLLESGGGLVQPGGSLRLSCAASGFTFSWYVMHWVRQAPGKCLEWVSSIYPSGGKTSYADSVKGRFTISRDNSKNTLYLQMNSLRAEDTAVYYCARQRYRGPKYYYYMDVWGQGTTVTVSSGGGGSGGGGSGGGGSGGGGSDIVMTQSPLSLPVTPGEPASISCRSSQSLLHSNGYNYLDWYLQKPGQSPQLLIYLGSNRASGVPDRFSGSGSGTDFTLKISRVEAEDVGVYYCMQALQTPWTFGCGTKVEI

SEQ ID NO: 154 - protein, 711 aa, Artificial Sequence
  Synthetic Polypeptide
EVQLLESGGGLVQPGGSLRLSCAASGFTFSHYIMMWVRQAPGKGLEWVSGIYSSGGITVYADSVKGRFTISRDNSKNTLYLQMNSLRAEDTAVYYCAYRRIGVPRRDEFDIWGQGTMVTVSSASTKGPSVFPLAPSSKSTSGGTAALGCLVKDYFPEPVTVSWNSGALTSGVHTFPAVLQSSGLYSLSSVVTVPSSSLGTQTYICNVNHKPSNTKVDKRVEPKSCDKTHTCPPCPAPELLGGPSVFLFPPKPKDTLMISRTPEVTCVVVDVSHEDPEVKFNWYVDGVEVHNAKTKPREEQYNSTYRVVSVLTVLHQDWLNGKEYKCKVSNKALPAPIEKTISKAKGQPREPQVYTLPPSREEMTKNQVSLTCLVKGFYPSDIAVEWESNGQPENNYKTTPPVLDSDGSFFLYSKLTVDKSRWQQGNVFSCSVMHEALHNHYTQKSLSLSPGGSGGGSEVQLLESGGGLVQPGGSLRLSCAASGFTFSWYVMHWVRQAPGKCLEWVSSIYPSGGKTSYADSVKGRFTISRDNSKNTLYLQMNSLRAEDTAVYYCARQRYRGPKYYYYMDVWGQGTTVTVSSGGGGSGGGGSGGGGSGGGGSDIVMTQSPLSLPVTPGEPASISCRSSQSLLHSNGYNYLDWYLQKPGQSPQLLIYLGSNRASGVPDRFSGSGSGTDFTLKISRVEAEDVGVYYCMQALQTPWTFGCGTKVEI

SEQ ID NO: 155 - protein, 710 aa, Artificial Sequence
  Synthetic Polypeptide
EVQLLESGGGLVQPGGSLRLSCAASGFTFSHYIMMWVRQAPGKGLEWVSGIYSSGGITVYADSVKGRFTISRDNSKNTLYLQMNSLRAEDTAVYYCAYRRIGVPRRDEFDIWGQGTMVTVSSASTKGPSVFPLAPSSKSTSGGTAALGCLVKDYFPEPVTVSWNSGALTSGVHTFPAVLQSSGLYSLSSVVTVPSSSLGTQTYICNVNHKPSNTKVDKRVEPKSCDKTHTCPPCPAPELLGGPSVFLFPPKPKDTLMISRTPEVTCVVVDVSHEDPEVKFNWYVDGVEVHNAKTKPREEQYNSTYRVVSVLTVLHQDWLNGKEYKCKVSNKALPAPIEKTISKAKGQPREPQVYTLPPSREEMTKNQVSLTCLVKGFYPSDIAVEWESNGQPENNYKTTPPVLDSDGSFFLYSKLTVDKSRWQQGNVFSCSVMHEALHNHYTQKSLSLSPGSGGGSEVQLLESGGGLVQPGGSLRLSCAASGFTFSHYVMHWVRQAPGKCLEWVSSIYPSGGLTKYADSVKGRFTISRDNSKNTLYLQMNSLRAEDTAVYYCARQRYRGPKYYYYMDVWGQGTTVTVSSGGGGSGGGGSGGGGSGGGGSDIVMTQSPLSLPVTPGEPASISCRSSQSLLHSNGYNYLDWYLQKPGQSPQLLIYLGSNRASGVPDRFSGSGSGTDFTLKISRVEAEDVGVYYCMQALQTPWTFGCGTKVEI

SEQ ID NO: 156 - protein, 711 aa, Artificial Sequence
  Synthetic Polypeptide
EVQLLESGGGLVQPGGSLRLSCAASGFTFSHYIMMWVRQAPGKGLEWVSGIYSSGGITVYADSVKGRFTISRDNSKNTLYLQMNSLRAEDTAVYYCAYRRIGVPRRDEFDIWGQGTMVTVSSASTKGPSVFPLAPSSKSTSGGTAALGCLVKDYFPEPVTVSWNSGALTSGVHTFPAVLQSSGLYSLSSVVTVPSSSLGTQTYICNVNHKPSNTKVDKRVEPKSCDKTHTCPPCPAPELLGGPSVFLFPPKPKDTLMISRTPEVTCVVVDVSHEDPEVKFNWYVDGVEVHNAKTKPREEQYNSTYRVVSVLTVLHQDWLNGKEYKCKVSNKALPAPIEKTISKAKGQPREPQVYTLPPSREEMTKNQVSLTCLVKGFYPSDIAVEWESNGQPENNYKTTPPVLDSDGSFFLYSKLTVDKSRWQQGNVFSCSVMHEALHNHYTQKSLSLSPGGSGGGSEVQLLESGGGLVQPGGSLRLSCAASGFTFSHYVMHWVRQAPGKCLEWVSSIYPSGGLTKYADSVKGRFTISRDNSKNTLYLQMNSLRAEDTAVYYCARQRYRGPKYYYYMDVWGQGTTVTVSSGGGGSGGGGSGGGGSGGGGSDIVMTQSPLSLPVTPGEPASISCRSSQSLLHSNGYNYLDWYLQKPGQSPQLLIYLGSNRASGVPDRFSGSGSGTDFTLKISRVEAEDVGVYYCMQALQTPWTFGCGTKVEI

SEQ ID NO: 157 - protein, 710 aa, Artificial Sequence
  Synthetic Polypeptide
EVQLLESGGGLVQPGGSLRLSCAASGFTFSHYIMMWVRQAPGKGLEWVSGIYSSGGITVYADSVKGRFTISRDNSKNTLYLQMNSLRAEDTAVYYCAYRRIGVPRRDEFDIWGQGTMVTVSSASTKGPSVFPLAPSSKSTSGGTAALGCLVKDYFPEPVTVSWNSGALTSGVHTFPAVLQSSGLYSLSSVVTVPSSSLGTQTYICNVNHKPSNTKVDKRVEPKSCDKTHTCPPCPAPELLGGPSVFLFPPKPKDTLMISRTPEVTCVVVDVSHEDPEVKFNWYVDGVEVHNAKTKPREEQYNSTYRVVSVLTVLHQDWLNGKEYKCKVSNKALPAPIEKTISKAKGQPREPQVYTLPPSREEMTKNQVSLTCLVKGFYPSDIAVEWESNGQPENNYKTTPPVLDSDGSFFLYSKLTVDKSRWQQGNVFSCSVMHEALHNHYTQKSLSLSPGSGGGSEVQLLESGGGLVQPGGSLRLSCAASGFTFSWYSMHWVRQAPGKCLEWVSVIYPSGGKTRYADSVKGRFTISRDNSKNTLYLQMNSLRAEDTAVYYCARQRYRGPKYYYYMDVWGQGTTVTVSSGGGGSGGGGSGGGGSGGGGSDIVMTQSPLSLPVTPGEPASISCRSSQSLLHSNGYNYLDWYLQKPGQSPQLLIYLGSNRASGVPDRFSGSGSGTDFTLKISRVEAEDVGVYYCMQALQTPWTFGCGTKVEI

SEQ ID NO: 158 - protein, 711 aa, Artificial Sequence
  Synthetic Polypeptide
EVQLLESGGGLVQPGGSLRLSCAASGFTFSHYIMMWVRQAPGKGLEWVSGIYSSGGITVYADSVKGRFTISRDNSKNTLYLQMNSLRAEDTAVYYCAYRRIGVPRRDEFDIWGQGTMVTVSSASTKGPSVFPLAPSSKSTSGGTAALGCLVKDYFPEPVTVSWNSGALTSGVHTFPAVLQSSGLYSLSSVVTVPSSSLGTQTYICNVNHKPSNTKVDKRVEPKSCDKTHTCPPCPAPELLGGPSVFLFPPKPKDTLMISRTPEVTCVVVDVSHEDPEVKFNWYVDGVEVHNAKTKPREEQYNSTYRVVSVLTVLHQDWLNGKEYKCKVSNKALPAPIEKTISKAKGQPREPQVYTLPPSREEMTKNQVSLTCLVKGFYPSDIAVEWESNGQPENNYKTTPPVLDSDGSFFLYSKLTVDKSRWQQGNVFSCSVMHEALHNHYTQKSLSLSPGGSGGGSEVQLLESGGGLVQPGGSLRLSCAASGFTFSWYSMHWVRQAPGKCLEWVSVIYPSGGKTRYADSVKGRFTISRDNSKNTLYLQMNSLRAEDTAVYYCARQRYRGPKYYYYMDVWGQGTTVTVSSGGGGSGGGGSGGGGSGGGGSDIVMTQSPLSLPVTPGEPASISCRSSQSLLHSNGYNYLDWYLQKPGQSPQLLIYLGSNRASGVPDRFSGSGSGTDFTLKISRVEAEDVGVYYCMQALQTPWTFGCGTKVEI
